United States Patent Application Publication US 2022/0211063 A1 - sequence listing, part 35

SEQ ID NO: 104 - DNA, 7752769 bp, Penicillium roqueforti (residues 1,938,194-3,876,386 of 7,752,769)
  misc_feature (471)..(2988): n is a, c, g, or t
  misc_feature (125072)..(125245): n is a, c, g, or t
  misc_feature (177032)..(177807): n is a, c, g, or t
  misc_feature (384131)..(384321): n is a, c, g, or t
  misc_feature (555855)..(555880): n is a, c, g, or t
  misc_feature (601269)..(601369): n is a, c, g, or t
  misc_feature (676760)..(677104): n is a, c, g, or t
  misc_feature (719500)..(719699): n is a, c, g, or t
  misc_feature (1142715)..(1142932): n is a, c, g, or t
  misc_feature (1186263)..(1186885): n is a, c, g, or t
  misc_feature (1335746)..(1335917): n is a, c, g, or t
  misc_feature (1623895)..(1624083): n is a, c, g, or t
  misc_feature (1638049)..(1638216): n is a, c, g, or t
  misc_feature (1653229)..(1653350): n is a, c, g, or t
  misc_feature (1825533)..(1825713): n is a, c, g, or t
  misc_feature (2226341)..(2226489): n is a, c, g, or t
  misc_feature (2393331)..(2393497): n is a, c, g, or t
  misc_feature (2448034)..(2448172): n is a, c, g, or t
  misc_feature (2535309)..(2535422): n is a, c, g, or t
  misc_feature (2536982)..(2537204): n is a, c, g, or t
  misc_feature (2854127)..(2854165): n is a, c, g, or t
  misc_feature (2984530)..(2984779): n is a, c, g, or t
  misc_feature (3020832)..(3020991): n is a, c, g, or t
  misc_feature (3033668)..(3034045): n is a, c, g, or t
  misc_feature (3159261)..(3159382): n is a, c, g, or t
  misc_feature (3215495)..(3215760): n is a, c, g, or t
  misc_feature (3224555)..(3224857): n is a, c, g, or t
  misc_feature (3317439)..(3317719): n is a, c, g, or t
  misc_feature (3542087)..(3542262): n is a, c, g, or t
  misc_feature (3623094)..(3671593): n is a, c, g, or t
  misc_feature (3674133)..(3676169): n is a, c, g, or t
  misc_feature (3690943)..(3691177): n is a, c, g, or t
  misc_feature (3731688)..(3731946): n is a, c, g, or t
  misc_feature (3989072)..(3989247): n is a, c, g, or t
  misc_feature (3992031)..(3992142): n is a, c, g, or t
  misc_feature (4101392)..(4101829): n is a, c, g, or t
  misc_feature (4338949)..(4339078): n is a, c, g, or t
  misc_feature (4339456)..(4339760): n is a, c, g, or t
  misc_feature (4384123)..(4384285): n is a, c, g, or t
  misc_feature (4533763)..(4533989): n is a, c, g, or t
  misc_feature (4697083)..(4697253): n is a, c, g, or t
  misc_feature (4793877)..(4796592): n is a, c, g, or t
  misc_feature (4802191)..(4802563): n is a, c, g, or t
  misc_feature (5082556)..(5082699): n is a, c, g, or t
  misc_feature (5096738)..(5096894): n is a, c, g, or t
  misc_feature (5239486)..(5239624): n is a, c, g, or t
  misc_feature (5277839)..(5278023): n is a, c, g, or t
  misc_feature (5381237)..(5381436): n is a, c, g, or t
  misc_feature (5479330)..(5479761): n is a, c, g, or t
  misc_feature (5512321)..(5512517): n is a, c, g, or t
  misc_feature (5631252)..(5631339): n is a, c, g, or t
  misc_feature (5721734)..(5721958): n is a, c, g, or t
  misc_feature (5728851)..(5728996): n is a, c, g, or t
  misc_feature (5774044)..(5774133): n is a, c, g, or t
  misc_feature (5808510)..(5808554): n is a, c, g, or t
  misc_feature (5832986)..(5833103): n is a, c, g, or t
  misc_feature (5846543)..(5846734): n is a, c, g, or t
  misc_feature (5859671)..(5864392): n is a, c, g, or t
  misc_feature (5865373)..(5948372): n is a, c, g, or t
  misc_feature (5948953)..(5949387): n is a, c, g, or t
  misc_feature (6008441)..(6008529): n is a, c, g, or t
  misc_feature (6324411)..(6325132): n is a, c, g, or t
  misc_feature (6373261)..(6373621): n is a, c, g, or t
  misc_feature (6805627)..(6805629): n is a, c, g, or t
  misc_feature (6847060)..(6848075): n is a, c, g, or t
  misc_feature (6999759)..(6999891): n is a, c, g, or t
  misc_feature (7043521)..(7047328): n is a, c, g, or t
  misc_feature (7057075)..(7057580): n is a, c, g, or t
  misc_feature (7108482)..(7109253): n is a, c, g, or t
  misc_feature (7114390)..(7115078): n is a, c, g, or t
  misc_feature (7152168)..(7152363): n is a, c, g, or t
  misc_feature (7347495)..(7347601): n is a, c, g, or t
  misc_feature (7355758)..(7355762): n is a, c, g, or t
  misc_feature (7379240)..(7379514): n is a, c, g, or t
  misc_feature (7441661)..(7441886): n is a, c, g, or t
  misc_feature (7525010)..(7525129): n is a, c, g, or t
  misc_feature (7750626)..(7752539): n is a, c, g, or t
atacaaggacgaagaaaccacccgcctccgagtctccattcccctgtctgaagtgaccgctgtcgcgcccgtcaagtctccccgatcgacccggcggcatgttttcggtgtctttaccccatctacgaattaccgcttcgaagccctgagcgaacgcgatgcagaggactggatcgaccgcattcgtgccgagaccccccgcgacgaggacgagcgagctttcctggctttgaccaaaaagcacgatccccctgccatccagaaacagctcgtcgacgagacaaccgatcactccgacttcgatcacactggccgcgccagctctccggagccacgccatccgctgtccccacgcagtaaaaatgcccagaaactcccttacatccaggattactccggcaacgagatggcatcgcattcagagttctctgatggacctgcgccatcacgtaacatctacctacgatccatgccctccatccattcactgtccgtttcagcactggaggataaatcggcaccccggccgtcatcgtctctaccccgagataccagcaaacaaacagactcgggcactttgcgtgacccagagcgggtaatctgtcaggggtacctgcaggggctgcgcatacaaggaaccgtgcgtcagtggaaacggctctgggttgtgcttcgacctaagagtttggccttttacaaggatgaatcggagtatgctgcagtcaagatcatccccatgtctcatgtatttgatgccgcagaagtggaccctttgtcgagatcgaagacgttctgcttgcagatcatcgccgaagaaaagacctatcgactttgcgccccggatgaagagtccctggcgcgctggctgggctcattgaaaagcattctggccgcgcgcaggcgattggagccgtctatggccacttctgtataatgccactcgctctacggagtagggcttgttttattactctacctattcctactcccttccttcacctcatcttccctgcatctcaggaaccctctctcattatttcttatcttttaactcttttctttcaatatacccaggttggtgatctcgttttgactgctcgtctcgcggtgagctccggagtcttcgaataacggattggcgttagtaccttcgtgctcattgagcaccctgtttttttctaccttcatttctccaactgtctattgatttcattcattgacacgatgtattctcattgcatccatgcttctctctcactgtggcatcctcccttttccgtcgtccgtcttcttccatttcagtgtctatattgagtacctattatgtatcatattgcttcaggctgtactacgctagtgcataatatataatactctatcaggataccatcattcaagtttggtgttaaccgttcggtgtaatttttcgaatgtcacagatatggcgctaatgtatgacttatattacagagggtcaaaccaagcttttggtcggccttggctgagacccctcaattttagatgtgagaaatcaaattcgtgactctttttggagttgactagactcggcaaatcatccgtctacaattgggttacaaatttcgatttcgtggagaggtggactgaaatgcaggcagaagtagagccaatgagaatgctgaatgacgctacacataatctatatcttgggaataccaacctggagaataaactaaatgctatgtgagcaatacaagaaatgtgtagcaatgaatacaagaaccctcccatgaccaaactaacgcatttcctcttcttcaacgggaatactgttatactcacccgagaaggtcctgcctgcatcagtggtgaggtcgtcctcaggcttactctcgtgttgcacaaccaagaatgacaagaacacaatagcggctccaacccagtacagagggctggagtattgtgactgtaggaccatctgtccaatcagggagagcgggatggtcatactaagcccgactgtcacgataagcggggtggtgaggagcatggagtaagcccaagcaatgtcggagacaaatgatgcaaacgcgttggtctgatagacgtgaggttagaatcaaaggtgagcaacaggagtcggagccataccagaatgattgaccacactcgcgacgtctcgggtaaggagaagggctcaagtcccgtccagtgcatgatgaagaaaccaggccacagaaagatgatgttgaaaaatccaaccaggccgaagaagagtggcatgtttacccgggattcgtcgccaacttgtttcttcatcacgacggtataaagaccgtacaagatggcactgaacgctgccatggcatcgccaagggcaatctcccctgaggatttgtgtgggaatgaaccctcgccactatctgcgccctcgcctgtttctggcttggagagatctacgcgcgaaatcaggataatgccaatcagagaagccaagacacccattaatttgcgcatcgtgaatttctcaacacgcagcagggcgccgaagaccatagtccatacacctagaagagtgagggtgagaacctggtctttacacatctaaacgggggaatcttaccactggtggaagtcagaatggttgtgcttgcaactgacgtgaattgaagacatcccatggcgaagtaatttgcctatccaagaaatctcgattagttcccttccaacacataagcttccatatcgtgaggtgtatgacatacagtaaactatgataggttagccagctgatcatctatctaagcctcaaggtcattgtgcttacccagagcagacaaaactgaatactgagtttagctgtcgctttaagccctagctttccgcttgaaggatcctgtctcccccgcgagaattgcccgtcctcttcatctgagccgctgcgtagtatcctctcctcctcggccttcgggtcatgcgaatccaaatggttcaaaaagctcctcaacgatgtgatctgagaaagtttcccgtgacgccagagagcccatgttcgacgagcgacgatgagaatgagaggcatcataaacatggaggtattcgtgtaagttacgaagaaagggttcgggtatgttttgtcggcgaagatagtctggatgtcatttcatgggtaattagccaaatgtttgtatcaatgtatgtattttgcgttacgaggttatgatttctcaggaagggatgcgcatacacttccaaggaaattcgaggttgtccacagcacaaccaccactaggagcaggatgattcctaatgttcgccgcgccatccccagtggcatcgtgccaggtgcttcgtgtgtggtcaaggccatggttgtttaagttgttttagttgcctgtgagagggttgaatctgcgcgactcgtcgaggcgtaatactggtgaagaacctcgtgccgccgatgtcgcaatcgctacgtttgcagccgaggatgccgagttggacgggatatcagtcggaccgctgtcatctgaacatctgaagcgtaatgagcaaagatctctgtgcagaagcaaatgagtgtcacgagacttcctgcctaaatatatgcgctgaagagaacacggggttatgccaagcattcgcaagataagggtccgggtggggagaaatgtagtcgccgatattatttcggtactccgtacggagtacatttatttgtagtaattaaccacgagctacatcagcctacatgtgataaataccctgatggctatcataagaagtaacctgccctggtgactacggatcatctgatggtactagatttacttcgagggagtatgcgatcaactgcctattacggaaaaatgaaggaatcgcattaagcctaacaaagacattgtctgcataaaactgacccgagaaagggttgagtaagaagtttctctctgaggtgaatttcacaatgaaaccaagacatctacaagacaccgggggaatggcaaggtgatccaaaacaaaccccgtggtcttctttacagactcaggaccggagaccaaccaaatagtagtaggaaaaaaggaaagacagaggaaataggtcgctggaacatcatagcaattggaagggtatatcaacaggcacagccatcacggtcattgtccagatggatgttgattgggtcgctgaattcaccgctgaattcctcagcctcttcctgggcaagtgcactccgcgcgataactaaatagtgattagaaatgtcgggaaagaacagtttttgagaaaagtagctagggaatttgactcaccttcaaacgcctgctcgacgttgacagcttccttggcactggtctcgaagtagggaatgttacccttcgactggcagaaagtcatggcccgttttgaggagatcatacgcttgttctcctctacatcgatcttgttaccgataacaacctgctcatgactattagcacggaccaacatatcattttgcctgctgctgcggcgcatgagataaggaaaagaaatgcaggaacaccacttacgaatgggaaactctctgggtccctcgggcttgcctggatcaagaactcatctcgccagctgtcgagagcctcgaaactcttggagttgttcacatcataaaccaagacacagcagtcggctccacgatagaaggcgactcccaacgactggaaccgttcttggcccgcagtatcccaaatctgacacctcaaagttagttactgcccctcatcacgagattgtgctaaagtctctagcgccttacctgcattgtcacgagtcggtcgtcaacgagaacctcctttgtgaggaaatctgctccgattgtggccttgtagcttccactgaacttcttattgacctattcagctcataaaattgcatgttagcggttataggtcttcggggccgaccgcggtacggccataggctagtttgggacgagattgaacggacatattggttcatcaaacttgtttttcccacaccactgtcaccaaggataataacctagatttcaaagacgccagttagcaaaaaaaacccccacatattgaaagattcagtgcccgtcacacggatcagatgcggggattgtaccttgaggaggaccttcttccttgacgccatggttggggattggccaagtgaccaagtgtaaatgtgcgaggaataaccgtaagttcactattaagcaaagacctataagcagtcttcactaagcctttatagaacagataaggacaagttagttggagagttggggtcgggttgcagccggattcgatgatgcatgaggagagctgggcggtggagcgggcggtgggcaagtgataacgattagcacatctgactccccaagcggcaaccaactccacttcatcactttcaggtacatttgcttggaaggcttatggcccactggagggaggattacttggctgccctgacagtgcgagaccaacgagagaaagcaaatgctactctctatgatgcctgtcagtctatcattgatgctttttgttgagtgattgcgactgacatcatttaccaaatctagatgcccagcttgcagatcgcaccagcaaattagcagcagcagcaaaacttaccagtcctgcaatagcgcagagtgaagctcaacccactgtcccatctcctatagttgcaccatccaaaaggcaacgatcgactgagccagactataccccgactgatcttctcaatactacccgtgcagacctttccgaggcacagcgatcccgctcggaattacaagatcgcttgaatcgggtgaacacagaagcagaaacacttcgcaagaagagttcacaagaggctcgacgaataaacgccttggaaagcgagagggcgcatctcaagctacgattggcagacagagatgcggagctaaaagggaaagccaagctgctagaggtaggctgtttgatattcacataggctttctaatcacgcaagggtgagtgagggaaagtggctgacatacttgtgcgcatctctgcaggatttccaagatgaactggcgacgctaaaccttcagcttaatatggcagaagaacgatcaactcgacttaaaaatgaaaacaaagacctagttgatcgttggatggccagaatgggtcaagaagccgaggctatgaacgatgcatcgaagtattcctgactagtcctaatgcaccgagcaggtgacagggctaggttgctagaatagaacggagtctagctcctgcggcatttatatattgaatcatgatagccactgcaaaagcgctagatatatatggtcgtgcggctacattaagcttgctcatctttccactgaatgcctgaacagcaggtgctgcacaaagcccgcgcgtggtccatgacttactttcctataatcagtcgaaaatagctagctccctaaccacatcgcccctgtacaactccttgagagcctcgaaaagtcctgataatcccaccaagttgcatacgataagccgcatagctagtgcctatgtcccgcgataatctaatactgtcctcttagattgcctgtcaattaccaacattccattcaatattcatacaccatagcactaaatattgaggaatgagaaggctaaaccaagtatcttactaccagggcctgaacttgaaaggattattcgttttgtacagtcaggttgtcagaaaatggtatcatacaaaaataaacagggaaagtatatccaataacggacaaagtaatgtacaaaagtgccaaaaactaaatgtatgtgccatgcaaaaataccaaactagccattgaagactatggcgtatcatcaatgaaagctttcagccgagagctgtctttagtggcaatgaaatatgtaccaccaacgtcagtccagctcacgttgttcgaccagtaattcttctgctggaccttgaggagattaatcggagagttcaggttgcgagactggattttgtgaccagcgggaacgaaagacttaagtgagacaattttgcagccttctttcatatccaaaaaatggttgatcagctcattgttcagttgtggggtgaaggcctggttgttgataagcaccacgtcagcccgcttcaagacgcttatgatactctcctgctcaagaaagtcacctcggacaagatgagtttttcctggcgcaattccccacagccggcatcgagccttgaactcggattgctgcaaatctgccaaatcacatgcgtttgacatcatctcgcaaccccaactctcacagccaacttcgagtgccgcctgaagaacgacattacctacgcccgagccaagatcaacaaagacttggcccgattttagcttggtttctttgaaaattgtgctgataaagcgggggagaagctctccgtagacgttgtccgtgccgttctcgtattgccggagtgactcgacttgaggggataccgtgcgcgagtaaatttgagtgagaattctttccacccaaggtaaaccaatgccttgtttcgcatccaaatgcttcgcaagactgccgttggtccttaaccgctggatagccttattgtaatcatcgacagcttcccggaattgagtctcggatgttacagccagggcccggcgtaatcggcgcctgatccccgtcgtctcgtcgttgaactgaccagcctcctcgctcgggatgtaattatcgcagaccgtttcgatgacctgaacaatgtcgtcgatgggtcggaatccgtcactttctcgggggactacagagtcatatctggccgaacaataaattagcatatcagtgtccagagatcgatagtctaaccaaacgtacctctcctgctgcgaagcactggggtattgcaggagaatctctttgcgcttgccctcggcgccaaaggcgggcttgaacttgccggacttctgacccgacgttatatccgcggcatgtatcattttaaacgggcgagatccttcttctgagaacgccttcgccgagcggagacgccgctccgggtcgggttcggcgctggcgctagtcctcgcgcgtttgtgcacctcaaacgaggcctcgctgtcgctggcgtcatcgtcgctcgagagtcgttgttcgggtgtcggcctttttcgagtgcgcgagggagtacttaatcgttttgccgagcgtgcttccaggtcactagagaccgatcgagatttcaacgcccgcgccttccggttccgctccgccgaggactggattcgaggtgatcgagtatccgagggttgggtgactgatcgtgtaggagctgcaggtcgagtctgcacaaccttgcgaatttgcgccttctttggctgtagtgagaaggccccggcccctcctttctgaaggtggtcgaaaaagcccatatggatagggatagatagatataaacaaactaatgcagaatggaaatgatgtatgcaaagaatgcaataaaaacgagtcaaacgatataagtataatgcgagcaagaaggaagcgggagaagaaaagaaaagaagcagggcttatcgattaaggcgccactcggggaaaccacgcgatcccgcgttccttggcacttacttggcgcttttgtctatagcctcatttcttctacaggcgtctaaatggatctacatatatgttgttcaaatgttccaaggttaccatctggctatcaaaagtcagattatatatgtaaattatccgattcaaacatttgaactatgaactatggccactctctctatttcttcgactttttcttcgccagcctcttctccgcacgaacatccttcttcatacgagcatcgacaatcttgtacttgcccttgacacccttaggacggccagagataccacgattgggacctttggccactacgagcttgacttcctgcttaggcttcttcttggttgccctgctcatcaatctcgcgattgcgccagctttgtcccgctcgctgagagcatcgtcctctgccaaaagcgctgacttcttgcgcagtttctccagtctttgagccgccttgtacttcttgcgtccctgggcctccatcaccttcttgatcgggcgggcattgatggcacgcatcttttctctaatagcatccgcggcagccttggtgatgggacggacaggcctgctgtgcttgccctcgtcgtcgaggaaccattcgggaaggccgtccacgtcgcggaaagcaaatcggttgaagccatcgtcaacaatatcagtcgaccttttttctccagtagccattgcttgcgcaagggccatggcttctgcggtaatgatgtcgatgtctgtaggttgaggaataaatgttagtcctgacgttattcatgtccagcatcaaacttacccagctggccattcgctttgagtggatcttttccttctgtctgttcagcctcgctctcatcggactcgtcgacccagtcagagttcttctttccgttcttcttgttcttttgtttggaggtaggaatataatcctcttcttcctcgtcttcatccatcgcaaagatgttgtcgctttcatcatcttcctcttcctctgcctctttttcttcttcttcttcctcttcctcctcgccctcttctagaccttcgaagatatcttgatcgaagaacatggaggcattgtttgaaagtttcttagcagcaagtgcttgacttgtagtggcagtttcatcatccgaatcctcctcctcctcatcactgctgcctttctctctgtcagaaaagccctcccactcgtccacttcgtattgcttgcgtgtctttttagcacgcaatttcgaatccttgtcctccaggcggccggtgtactgctcgtacatctggtcgagctccctttcaagacggtcctcctcgtcgtcgctctcttcggtttcggactcggattcgttttcattttcactgccgctctcggtaggaagatcacgagcattgacaactgcatctctggcattctcccggtcgacgcgtcgcaaagtgaatgtggtgtcgtcacctcccataccaagctgctccataccaatttccatgggagtggtcatgttcatctgcattcgaatgatatccttgcgcttcttttcattctccttgcgcctttccttcttgcccttggtagtctgctgctctcgcatgcggatcaagtcttcctggatctgtagttcttcgtccataggggccacctcggccacttcttcttcctcgccttcttgggttggcttctttttgatcacaagtccgaacttctctcgacacttgatacgccatctgagcaagttgcggaactcctttttgcctagtaccttcagatcctcacagcaagttcggatctcctctgttgtttcctccaaacgatccagtgtggacaacgcaagatctccacctggcggttgctggaagctaagtttgttgtagccacccaagatagagatagggtcagtagtgttgatgaaatccgtcacggggatctccttgtgttgggtgtaatctccttcttcataaccttcacgcttgcgcttcttcttttctgggttgaaaaccttcgcttcgtagttgggggtgggagcggtaagttcagcaaagacgtgcttcgggtcgaggaacttcgggtcaatgcgctttggggccttgaatccgcggcaaacgacgaaaatttcggcagagacatttcgagacgaaggaggcttggttgcctcgacggaattgaacagctgcttgaagacccacagcagggggttgtaatctttggaccggaagaccttagtaacgaaggttccgccctcgcccaagaaatcagtagccagtctcagggactccaaaaccaattctgcctgggagaaagcatcttgaacccaagcggcaccaacgttgggcgcaccatcgtgaaggacgacatctgctttccagtgtttgatgtgtgatcgaatcgttgcgcgacacttgtccgttgtgatatcgctctggaaagtaatggctcgaggaattggcttgataggggagagatcgacaccaatgataagactttgcgcaggcatgtactctgcagcgacttgacaccatgactgctcggccgttagaaaaaaaaaaaactttggggataaaggtgccattcgaggatacttacaccaggcgcagcgcaaagatcgatacaaactctgcttttctctaagaatccatacttctgattcaattggatcaacttgaatgcggcacgggctctgtaacccttttctttggcaagtcgataccacttatccaaacgaccttttccatgctgcaaatagtcagcacatgaagtgatgcaagctgaggtacggtataacatacctttttctggatcgccattttgaaggaaagctgatctcaatagaccagagaatcctttcgaaaatgaccggagatgtagaacgaatgtatactttttttctatggcagaggatccgagaaaaaaaaagttgcattacttatcgctcaccgcctttgaaccggctctccagattgctgcctgaggccaaagttgcaccaaacatgtgacatgatatcactcaggcacccccggtcacttgtggcgcttggtagaagctttgtcacttgggtttgatcgtctaactatagacctgatgtttttaccctacctccatgacgcccaagggatctcgcaagagagtgaagaccagcccctccggcgtggactcaccggctgaactgagcggtgatggccgagaccgctcagactcccagtcacgggggtacaatgccgtaagctctttgtggctagaatagccagtcctttttgtcatatttactgatcatctatcgtttatatagagctggtatcccggctcctggtcttccattgcgaaagtgtccaaagcagcgccagttaccgaggttgcccgtgaaagcatctcagcagccaaatctgtagcatcgaacgtcacgaactcatcggcttctctccttgatacatcaacaaagaatcgatattcttctattcaacttacgcgaaaagcgggcgcctcgactaggtctctccccgctgacgccaccaccacccgagtcaacattgcgtcggatggttcggcttccactacggctgtcgacgatcccgaaagctccagggccctagaaccggcaaaatccgataaagaaacacccaacgaaagtgatatcaagccgttagaggaaccggccaaggagcagaaggccactcccaacgccgatcccagcacattgcatgcgggatctgcagagggccccgaacaatctagtcgttggctctcatggatatatggaccatcaactacatctaaaggccctacgaatgttccggattcaacgccagccgtggaaaatccgttggccgagaatcaaatggcagagcagagtactcaacctatagtgaaagactatacagcacgggaagaggaacaactggatccggaaccagagcagaccaaagatactgttgaagttaccctcacatcccagaagcgatcgtggcttcagatgtggtatggtacaaatacaccgagccagcaaaataacccaccatctacagaatccacgataaccccatccgcgaattccgattccaccgatacccctgacacaaaaatggcgccgcaagatcccccagatgagccagcagaacgagctggcggatcacagaccccggtcggaaccacgagatcatctggctggtcattctggtccaaagattcaaacaaagatgggtcttccaataaaccgcaggaagccgaagctatcgaggcgtcaatgggaccgaactcgccatcaaaccatacggcgcttgagccagatacagattcaaatatcaagataacccagaaaagcagtatcaaagtcaagcccacgaaagacaaacgtcttaaggttggacccaccactgaaagcactcctacatctacgccacctgttgaacctcgaccagccgatgttaccgcctcaaaacaattacagcaaattcttcccaaccaagtactaccgaagttcgaagaaacctatgcgtttgagcaatcgccctccattttgcagagcctcgggcgattcctgaattatgggaaaggaacagaggttcggcacgtcagtagggtcaaagatccgcttcatgtgagacacgccttggctattggcgttcatggatatttccccgcccctttcattcgaagtgtactcggacagcccacagggacatccatccggttctccaatatggcagcagacgccatccggaagtacaccgagagccatggctactcttgcgagattgcaaagattgcattggaaggagaaggccgcattacggagcgagtggatctcctatggaagctccttctgaattggatggaggaaatccggaaggctgatttcgttatgttcgcatgtcacagtcaaggtgtgccagtaacaattatgctagttgcaaagttgatacagttcggctgtcttgacgccaaacgagtcggcatctgcgctatggcaggtgtgaaccttggccccttcccggattatcgttctcgatggatcagtgggtctgctggagagctgtttgagtttgcactaccttatagcaaggtctcgaaagagtacgaagctgctctcaaatgtgccctcaattttggtgttcgcatctcttacataggaagtatcgatgaccaacttgtttcactggaggtaagtacataactcgatattcaaacatctatcaaatttctgactagcctccagtcctccctcttctcacctatagcccacccttacgtctaccgcgctgtcttcgttgatggccgagtccacaccccaagcttgtgagcaacttaacttcctcatccacctaatctcgatcgacgatcctaataacaaaacacagcctctctcatctagttggcttcgtcctcaagcttcgcaaccttggtatctcagaccacggtctaatccgagagttaagcaccccactagcaggaagtctatactcaggagagggacattctcggctgtacgacgaggaagccgtttactcgtatgtaacagtcataaatccctacccacaaacaaaactgacattatcttccagcatggccatagaattcgcactcgagacttcttccgtctcagactccgcgctcagcgtcaagcgagccagcagctccgtcacgccaaacccgtacattctccccttcgccatgcgtggtctgctcgaagaggagtatgtgcgtcgagagctgcataatgagacaatggaattgctcaagcaatttgacgactggaaaccttctagtaaggttctgaaggatgtaaagtttagactagaaggtatccggtccaagctctagctaagcttgttagtcgataattagaagtttcttgcttggatggaaatttgatattagcggtttattagatatggaaatacattttcgcttttcttaagtacttgctgccggtctgtatgtaagtacaataataacttccatgtatagcaacagtatatacattcctttctcggttttggtcgatttgtgatggaagttgtctttcatatttgtattatagcggagatgtcaaaaaatgtcgcgattttgttgagcacagaacgagaatgaatagtggagactccagtcgtaagaagaggggaggggatcattataaaaatgcaaatacaggcatgaaagtgccagggaaataaaaaaagaagctcagaacgaccgaagacaaaaccgccctggttaaacagatgcgagtgggaacgccgttttatatgcaccttcgatttcatctagaacaatgttagcgtgagaaccgcataccagaaaaagatacaacaccaacctctcatcccatccaatgcctcgaaagcaagcgaataattcgacaccgccccgatgatccgctctaagccctgccggagttcctcaatgagctggccagtcgaatctccgccttgctcattctcggcggtgtcgggcgcaagctgcttcgccacgcgcgccttatagtagatcatgaacatagcatagctactttgcataagacagcatgcgaaggagggcattgtccggggtaacgaacgaccctgctgctgctgggggtctgagagaggctgcgggacgggcaggttgtggaacatgcgggagatgacgagtgcggcctgtagacagatcttcgcggattgctgcgtgctgtaggggaacccagccgcgaatggatattgcgagtactgaggtgcgtatgagctgatttcggggttgatgtctgatgaggtggaggaatcggatggggtcatgtattccgttgaggttgctcgttcgagagaggttaggtttgaacaggagcaggtgatgttgttgatgccggcgggtttggtgctgacaattgtggtggcgctgtttggatttgctgccgtcaggtcacaatgtctttttatgaaaagggggatgtctgagaaggctcggaagcgatgcgttttgatttgggcactgtagtcattgttagatgggtttagatatgacaaggtgaatagctcgaacctggatagcttgatccgggatattgcgcgtatgctttgggctgtaatggattcgttgtgatcgccgaaatccgaggtctggggcagaagcgggagtagctccgcttgtgcaatcacagactgggtccaggcatcaagttgctgcattctttcgaacatataatacatccctgattgtgacgcgatgcacttgttcagatcaccaatgaactgggttgccgatacaagcacttgttgagcttgtataaagatagcccaaccctgaagaccggttagcggatgaaaaataatgcggagatcttcgagtgcaaacctcggtatctgatgaaaacgatgggtatggagtcgtgaactgcgggtcattgatgacaatagcaggcatctgtttctttattagctgcagttcatgcctgaaaagctaagttactcaccgttgtgctaacaatagatccttgaaccacacaataatactggacaacaattagatcaggaaccaaccaatgaaagaggagagatacaaacagtcatccaccaggctctccgtcgagcttccgaagattcatcgttctccagttgagcatggagtgacttgtccaaggcaattgcaagagcctgaccagcgcgatatcgcatcttgagtaagttaccgcgctgggagtattcataaactgaaagcaccaagagagccaggagactttcataatccaccggagtttgcgaatgaaatctttcccgcccaacaaacggtcgtgcggcagacaatgcctgtccgggatcagtcgaggacagatcaagatcgcactccgcttcgattgttgaatgggcaagttgggcgaaagtatgcgcgtatgttctgcgctggattacagatgctgcggacgacggctcaatatcacttgggtgcggaatcaaagccaagattgcagatattgcaagacttagaggtgaacggggccggtacatcatcatcggttcggatgtattcgagcacggaacagagcagttcaacggtcgatctcggcacggtggcgatgcccgtggcggtagaatggggaaataattatgaatgaagtcataataggcattcaatctggggatattagacaatatctggaacttattgcagagagatacttacatttcgagctcacttccataggtccttacaaaggtttgagcgttgttcgaaggtgatgatatcaggggcacttgcatgtgcgactgactaccatcgccagtaaagaagctctggaacatggagggaatttcggattgaaaatcgagatgcctcaaacctgcgccaggcagagagagttcatcgatttggctgaacatccccggtgctagactttagtgagtatattgcttctttttcggacatgagggcgacgtcataccttcttcaaactccgggggtgaggggacagaattataaagagcatcatcttgcctcgattcttgttctggcgatagggaggacttttccttctttttgcgtggtccgcctcgtttgctgggcaagtaagagcattctctatctttgctaacacactagagtgaatgtcagtccagtccagtccatgcaatgaaaataaacattgatcaacccagatccacaaaaataaaagcgcccaaagcattcaaatcacaaagagtacatacgttcgtgcatggcatctggccgccacatcgtgtcctggaagcccggctgaaataacattagtggagatgttcctctttttttcttcacgggatttgctcaccaaggcagacatgctaccttaactggcggtttggcgaacttcttgcgaactgatcgaggtgctgtcgaggccagtccgttataatcctgaaaagtagcggccatgacgacacctaacataagtacgtcaatctacagaaccatttgaaactgcacctctcggatatcttggcaaccgaatactagttgaaatggggcatttagcttaataaaatcggaagtccgagagggcgttgatatagagacttccgtgtgattgcttgatctaggcaaatcccgagccgtggggaggttcgggatttgctttttggtaactaagcagagaggtcgagtccaaccccaaataggagggtggtgccagaatgcggtgtatatgtagggtaatcgaatgtggatatgtttcttatttcagattcatttttcttttctttctcggtcgaattcaggggatcaaaagagaaagcgaaaacgaaaggcaattttgatattcgaagtatttcggattgaacgttccgatacgaaagatactagcattaactgaccaaactgcaacatgtgactgtaattttaccaaaaacattcgatcacgtggatccacagtggcacgccgatgatgtagggagtaagcgacttaggtaagattatctattattgagaatgatcacttgcaaatacttcaagattaaatttatggagtagttcctgtcgatttcttccaaacaggacgttcggataattcggggactatgcaacggtgtggatcctgaaggtatcgctaagccactcacaatgcgcgcgctactacatacatgatttggaatagttttcatgcgaggcatcgtcgatcgatgctaatcgactattcacggggatgcgcataatccgatccgtaattagacttaagtatgggccttgccttttccaagggggaccttaaggcccacaacatgccgcacactatcccagacactgtcctggaccttcacagggatcttgtgtccctttaagaattggtcgatcaaccacattccaaccacgaattcttcacgcagcaagagtccgttattttggtgatcgaccagatcccatacttgccccaagattgcctctgacaggcggctgcgggaccagatctcccggacgaccagattgagaaccatctccgaggcatgaggtggccatgactcgcttccatcggaatcgggagggatgagaagccctttattagacgcccaaacaccttcgtaccgcttgcgttccctctcggtgacctcggttcgccagcgcttacggtccccctccctgtgtttgtgagggtgtttgtgtagggggtttctatgcttgcgatggtcggcatcagtgggtttcggcatgccgcggagtgtcatcggcatgctcttcggtggacttggtgtcctggacagatcagtcttgtgatgatggtgtgtcaaatgtagaatggctcgtgcccctcgtcgatggggaggaagcggcgggggaggattgggagatggggatgctcgtgatgatgccagggatgaggcgataattgcattggagagggattcctcggtcattccaagagagtcatctattagactggagctactcgtcgtacgtgaatggtttgacatggacgcctcgctcggtgtcgaaggtcgcaggggtgttgtgatgaatccatgatttctgatagaccctcgtggtggaggcacacggggcggaagcctcggttttgactcatcagacggcatagaaggattcagagactctagagaaggatggggactcggtcctcgactatcctgatcatccagagttgacctggattgttgggatggagagcgcttgtagataggcagatctgagtcggactttaagccactttcgtgcagcatgcgacctaagtagatatctctgtcatgtatcgagcgaagagaggctggtaatggtggcacccggctcgcacttcgtgctgcacttgcgcctgctccaagtctggcggttgtcgacggaacactggtgtctcgcccaggggaccttgacgcagcgagtcgtgccgcaatttgggaggtcgaggtcgaggatagagaggctgctgaagctcgtcccctcaaacttgacaatgtactgactggaggcgaaggtggcttggcccatctcccgattttatcctttacggagcccacttcgggggcgtcggatccagctctctggcgacccagagtatgacggtcacttgccattgcggcagtggcaacagaggatctagggttcacattaggtgagtgatccatagagtgttggaatgcaagcatggcgccttgtaatgcgtcattccgggccacgcccaaccgctggttcgcggaagcggcctcgccatccatggaatcgattccccacagaatccgacaagtaagcgagttatgttgaagggaattatatcaagatcaagataatcaatgatcaggagggtcctgcgatttgtttctgagacgtttaaggggaaatatcgacgggaaatgcacgtgcacgcgaccgtacacgtttcttctacgcgactatatatgttgcatgtataaaatcacatatcacgattaaatccttttcagatactgtatctagatgatttctctattttatcacattcctaacatcactattattactccgtatactctagtgactccgcactgtaaccccagattctaattagccgagccgcaattcattcatccgttctccgctttgcatccttcccctccatctgcaatgtgacttacatgtcagcctggcttggggaaatgttatcttcttctctcaagcccagtcggagccatgtcgggtaaagacaaccccgatgattcccctgttgaaacatatggaaggtccgaagtccgccaagatacagatcagaatgcagacgaattggtcgccggccacacccgatgctcagtttgtagcagtaccttccgacgaccggagcatctgaaacgacatctgcggagtcatacaaaggagaaaccatttgagtgtgtccagtgcggccggcacttttcaaggacgtatgcgcttgggctatagttatccttatgtcgaatcatacactaatcaatccctagtgacaccctccatcgacatgaactgagtcaccatgcaccagggacgggagggaaagaccgcacccaccggattactgtcaaaacattccgagcatgctttagttgcgcaacggccagagtaagatgtagcggcgggacgccatgtggacggtgcgacgctcgctcgctcggatgtcaataccccacacaaaggcggtccaaagccaaagacatgagagattcagggcaaggagccgatgcgcaaaatgacaatctcaaacccatgcatcaagacttgaattcagcttctagtcagagccaattttctacacaccggcaaaaggagctggcatcatccaaaacttcgctcaatgtaacatctacacccggcagtgatcacaaaagacaaatatcacaagatgcgcacaccattgcaaatgccccgaatcctcgtttccttctcccaaatgagatacgacggccgtctgaaatactgccactgggagcttaccagacgtatgacaactcgagctccaatatcctcaaagcattccctgttaattcatccaacaatctaagctctgaaataagtgataaccagccgggtatggacccagcaggtaataattctgaggtaccgctagagtttgatcccacgttctttgaccagtctacgctttccactatcaattggctccctagggagttgcttcctagtgattctaatggctacgcacagtctaccggtgtttcctcgcgatacaaccaatctctcagcccaagcgcctacttatctcggacagagtggcaaccgccaattatcagcgctgagcagctcaatattttgcaaccagagcgagattctcagacaccctctgtccatgtttctctaaggaacaacatggaaaccttgaatcaatattcccacggtattagcgagccttctccgcatacagaatctgtgaattctgctagggggtcagcagactactatgttgatggtgcaccatccagacgccctaagtacgcgccttggtccagcgaatctgtagagccggttgatattggcaggcatttgttggtcgaagatggcgagcacaggttcaacttccctataatttccgaactgcgaacagatcaaatatcggaagatataacccggtgcacacgacggattgaaatctccacctacgatgagatttatcggtactttgttcaactgtgttgcaacgaaactcctttttttgaagtgttcgaatcggagaggtttcccaccgcggatgaatgcaaccagttcatcatcttcttctttgatacatttcaggctgtttatccgatattacatctttctaaatttgaccctaatacaagtcattggctcttgaccttgtcagtaatagcgctcggctgccaggtgtcccacatttccgagatggagcagtgtacaactgctctccgcgagctgattcggcggggtatataccttgaggtgagaaaggtccccttatccccattcaatgctttccagctaattgttctacaccaccagaaagaaaagagtccccctagtcagtcttctcttgagatattacaggctatgttgttcaattgcattggacttcttcatagtaagagcgagagagaaaaggcctcggcattgagcacctttggtgacttggtgatactcatgagaacttcccggttattgacaccgatgcggattaaatttaatgaggcatcccaggatgcagcttgggcttcttggattcaagatgaagtcagaagacgcaccggctattgtatatgggtgagctttgtcgaagaatggagcctttacttttactaacgatgatagcttgtggattgtactcttgcatattactttgatgatagacctctcctctccctagacgacggacaagctgcattgcctgcacatgagaagctatggcaagcatcctccgcagcgacatggaaaccactgtgggcgcagtcatgtggtaactcttattcagaccccaaaaccgaccaatcgctaacttctacagtcaatgaatccttatacgacgcagtccatatcctctatatcgagaagagagtagtgccaggtataggagaattcagtcatattctactcatccacgctctctaccagcgaatgtgggaagtgggagactacttccgccgcccactatccttctggagcccgacagcgaagaagcaatcttgcgagaccgccattcccagcggttcggtatggctcccaggaattccctcatactcgaaatggcgcaatagcgcatgtgactgcctcgacatccttcattggaccgccaacagcaccgcagccaaagctggaggcctcgagcacccaaccatcctccacctccacgttgcccggctattcctactctctccgttccgcgaaatgcgctccctcgcaacctccctggtaacagaaaagcagcactggcgcaaacgacaccagtccctcgagtggcaatacatctggcgctggatgaaacacgaccaatataaagcccggctatcaattatccacgccggcctcacgctctggcatattcgtcgctactcgatgaacgctttccacgagcctgtcgcggctttcatcgccgtgctgacgctgtgggcatacggatcctgtcacccgcatacatcccatgagtccagtccgcgtgcagaactgctccacgaatcgggttttattcagcttgaccggccttgcgatgatgagcttgtgcagattttcgtgcgtgagggtcataaaatgacagtaaacgtcactggtgttggtgatatatgtggaactgagggtccggaaaaggctctacgggttgggtgtgagattctttcgggcttaacggcgtggagtgtttcgaagaagttcatggctatcttgacacggcttgcggatttgagctcttatcattcttcttgggaataacatcgccagcatcagcatgatgctgagcatatctgatttggagcgggatgaacgatgaatttaccaaatatataaacaccttcaatacactagcttttgtattggtcttttggtatgttttatatataaattggagatcggggtgccatgggctagttatatattcctttcttccgatgatggttagcaaaaatagtgacgttaccgccggacaccaatcagttacgcgattcgtaacgggcatcatgaagttgaacgaatcttgaatggtaggataaatgtaggtataaatttggcgaaggcaattgagaactgtgatgatcatcagagtgataacttctttttccgtatagttcgagtggggccatttttatcttatcggcagtgcagcctaaaaacatctggggtagtgcgaccttccgactttcaacttccaacctccgtctcttaatttgcctaaatatggattccgacgagatcctagagcaggatctccacaagccagagaaagaagaagatttggacgaaaagtgagcccataactaactaacggttctgggtagatcactgatagctgttggcagataccccaatagacctcacaaccgggccccgacattgccgttccacgatctgtacctcagtctattcaatccactgagtgaactcaagaagaaaccttcggggcctcctcaagctcgccggaaagttggtccccatggtaaaggtgctacgagtctcaacccgttcgagcgccggcgcgatgtgattgagcgcttcatttcgcggtggcgcaaagaggttggcgacgatatctatcccgcatttcgattgattcttcccgacaaagaccgcgatcgacctatgtacgggatcaaggagaaggctatcgggaagatgctcgtcaaaatcatgaagatcaacaaagaatcagaagatggatacaatcttatgaattggaagcttcccggtcagggcgctacaacgcgtatggcgggtgactttgctggaagatgctttgacgttctctcgaagcggcctatgcggaccgagccgggcgacatgacgatcgacgaggtcaatgagaagctggataagctatctgctgccacaaaggaggatgaacaactgcccatattggccgagttctaccggcggatgaacccagaagagcttctgtggctcatccgcattatacttcggcagatgaaggtcggtgccaccgagcgaacactctttgatgtttggcatcccgatgccgagagtctgtacagcatctctagcagcctacgacgtgtgtgctgggagctgcatgatcccaatatccggcttgagggagaggagcgcggtgtcgcgttgatgcaatgcttccagccgcaactggcccaattccagatgcattcatttgagaagattattgctcgtatgaaaccaaccgaagatgacaaggtgttttggattgaggagaaaatggatggtgagcgtatacaactccatatggcgcctgacgattcaatcaaaggcggtcggagatttggcttctggtcacgcaaggcgaaagaatatacctacctatatggaaatggcatttatgacgagaatggtgctctcacaaggcatctaaaagatgcttttgtggatggagtacagagcattattctcgatggcgaaatgatcacctgggaccctgaacaggacgccatagttccttttggcaccctcaaaagtgcggcgctggcggaacaacgcaatcctttctcaaatggtccgcggcccttgttccgtgtcttcgatatcttatatctcaatggacgcgatctaacaaagtatacccttcgtgatcgtcgcaatgcgctagagaaagttatccgacctgtccatcgccgttttgaaattcacccatacgaggaagctactagcactgcagaggttgaagcggctctgcggaaggtcgtcgctgaggcatcagaaggtcttgtgttgaagaacccgcgctctccatatcggctgaacgaacgccacgatgactggatgaaagtcaaaccagactatatgaccgaatttggagagtccctagacgttgttgtgattggtggatactatggctcgggtcgtcgaggaggtgcgctgtctagttttctctgtggactacgagtcgacgacagcacacaagcagcagagaaattctggtccttttgtaaggtgggtggcgggtttactgcagccgactatcaggaggtgcgtcatcatacggatggcaaatggaaggcgtgggatgcgaagaagccaccgaccacctttatcgaactggcgggtggagatgcccagcatgagcgtccagatatgtggatcagaccatccgactcaattgttttgtgtgtgaaagctgcatctgtcgcaattagtgaccaattccgcatgggattgacgttgcgctttcctcgcttcaagaaattgcgcaaggacaaggattggaaaacctcactctcggttcaggagttccttgacctgaagtcaaatgcggagcaggaacaccgggagaaagagttctctgttgatcactctcgaaagaaacgagtgaagagagccactaaaaaaccactcacggttgctgggaacgatgataatgacgaggtccagtatcttgggccttctggacatatcttcgatgagcttaacttctgtatgtgtgctcccttcctatcgtacattatactaatataatggccttctagtcataatgaccgagtcgagcgtcccagaaaagaaaacaaaacttcaactggaacaactcgtgaaggctaatggtggcaagatttatcaaaccaagacagccggggtagacactctctgtgttgctgagcgaagtgagcttcattctatatataaaacaagtctaagctaatgtttcagcaggaacggtcaaagtagcttccttacaaaagagtggagagcaagacatcattcgaccatcttggcttatcgactgcgtcaagcaaaatgaaatagatgcaggcctgccggatctccttctcccattcgagccaaggtacgttttgacagccaaaggaggtacacatacaaggggctgataattagcgatttttatagacacatgtttttcatgacggaggataaagaggaagaagtcacagcaaatgtcgacaaattcatggacagctatgctcgcgatacaaccgtcgacgagctcaaggatgtatgacacccctagaaaaaatagcgagcaacaatcatgtctttggctgacaaatgttcaatcttacaggtattcaagcaaatggaacaaaaccaagagcagcccgatcatgccccagacccagcaagcgttcggagaatcgaagctctcatccaggaaaaagtaaacgccggctacacggttccatgtggatggctctttcgaggcttgaagtttcatttctactcgagcgaggatgagcaagacgaatcagcctccggagaactgagaaaggagcaccaacgcctccagttcgctcacaacacagcccgtttcgcaggcgctgagaactccagcttgttaaagagctcaggtaccacacacgtgatagtcgacccggggactttgtcttcagcggacatatcttctctccggaagtctctggccgaaaagccgggcgcgaaaatgccgcatcttgttagtgtggactgggtggaagaatgctggaaaaatggcaccttgctggacgaggagagtaagttgtaaccctcttcttcatatttatggctttttgggagcgttctaataattgctggcaggattcttggttcggcgatgaatcgtgagagctgagttcgaatcgcatgataaatcatgcatctctttcattttctgatttgctcttttggcccttgagtgtaatatatttttgttcccgttcttttgtagccaggcggcagaccagcagaatatacgtaacggtgaccaccatgcggactgtcgatttatgagctgcttccttgagtgccgacggattcttgcctagccctgtattcattcaacctgtcaagaacactggccccattccataattcttcatctccatcaatcctctttggcattcctacttgctctaatgcaaatgaagctgcaacagacccataacaagccgcctgttctatatcacctcccgtttggaggtacccaatagaatagcctcctagaaacgcgtttccagctccagtcggatcaaccactttagcagcctgctcttctccagtccctgctatgtgaaatgaaggtagccatttggataggttacccgatcgaacaaagcagccattttcaccagctcggataatcacagtaccctttccttccgggccgacaccactggctaggaatttcaaagccagcgtttcaatctcagttctatcaggagtagccggggtatccacaaacaatgcagctagctctaagtggtttggactaaacacgtcgactagggctacaaccgctagacagtcttgaaggttctccggcttgcatgaaaggggagccggttcccagataatcagaggacgatgttgtatacccgcctgctttcgaagagcgagtatgtttagaatgcgcgttctcatatcttggggagtagcaagatagtgatagattttcgaagttagcaaggctgtgcccggcaacttgctttcttgaattgtaagaaccggggtggtgtacttgaaattcttcgctagaagatgactcgaagttagctcatgttaatatgttatgtttgctgatttagtacgcatgaatatagaatttagaattatcggcaagtgaatataaacgggaatagcaagggcgacggaagaagggtaaagggaagggcttttcgcacgtccgaatgtggtatcttgatactccagtaagcctcgagtcgagggctggtctgattcttttgttatcaccaaaattgtatcccagctatgcaagagttctgcaatagggtccggaaagtcatttccaatatggatcggccaagccaaggagcggctcaatggagaaggcaggaacaaccgagcacctagagtcgctaggaaaaagatacaacgatcaggaatccggttgtttcaatcgagacattacaggcaaaaccaaccgtaagctccggacccacccagcacattgattaaaggtttccggttggcgaagcgaatttcgtcaagcaccaccaagccaaagcttacgaaggaaatatccttggtatccatggggaagatgagcccccaaacctctcaagacaaaattgagttgaagtctttctggggttgagtcatatatttccacttgaatgatctgtacataaacattgaagtgagtcaaataggtgtagttagagggaagccagtccgtaagctcacatgatacaacacgtgagccacgactaaggtaaacaaggaaacgttggaggcgaacgtgatctcaatgctctaaatctgtactagcttggaaatagaagacaatgaccctgttcccacttatcagaggagatcatggggttttcggaaccaatgattgttatcaggctacgtggatgatgtcatgtcgaatgcaagatgagatcacacagtgtgttacaagttgatctaagacatctattaggtacacaatgtctacgtaagtatagccactcaaattccctcgccagtattctagaattattcttaggagcagcattttgatgtaaaggacgaacaagaaccaacacaagcaaggacggagactctcccatagtatgttgtgtgctttacaactaccaggcaagaagctcaatttgtttcaagatttgatttgagttgaatagatatcttaggtagtgatcgaaatatcgatccgagaaaaagaaagaaaaagcagccatagaaaacgcatagcgctgtcaaggtagaaatgggggtatgtaacaaaagaaagaaaatatctgcgccgagcaggacaccgtcctagtccaacgccgcgcttgaggataaccgaaaataagaggaaaagaaaacaaaagatttatgtactgaagtgaagtgtgcccaaaaagggagaagtgtcgtgccataccttgcgctctgcgctaatacagtctgcccaaccctttgtttcaatgggctgagacgcccacccatcgggtcggaacggcgttgttgtcatctccgtcttcgtactgtcccgacaaatgggaattggtcttgcgcgctggcagccagatgcgagcacgggcggggatgtcatcgcggagtttgccgctgcggcgcatgttcatttcgagaaccaccacgcgcaagaaatcgctgttctcacgaatttcgcgctgacgcgacatgggtggattttctgggtcgaaagcgacaaatttctgatccttgctcgcgatgtggaaatggctccgccggttcccgcggccgccggctcggcgatatgtctgcatttggatcgagacggggcacgttttggaggtctgtagcttgtcgaggggatgatcatgatagacatacatctcggccggtgacatcggagtcggattcatcggagatggattcaggtagcggcgtagtgctggagaaggggtttcttgcatcggcaaagggcggcgatcatcggtcatctctggggtgatggtaaaaagagaccgggtaaggaaatcctctgtttggacggaaggggtggcaaatgtcgagaccgactgcgcagcggatttgatggcccgtagagatgctgtgaggtttgacttgaaactagatcccaggcgcccaaatgacgcagatcgccttgcgggtacagcgtcgggtgtggcaggcccattgtcgtttttgatttcgatgtattcgagttcatcgatatcaatttcgtttctaaggagaggatggtctaagtcacactcctcgcaattcgaataccgaggctgtcgtctctcaggtggacttctatggttggaaggggtgggcggcgagagaagactggatggcgatgctaggccatggtctaatgagggtatcgaatcgcttgaggttgatctcactgacggtggtgattcatgttccgaatcgtggcaaggcaggagtttatccggtgggctgagcaggatgtcaagaggggagtaggcggccccatccaggaaactctcttctttcgactcaatatcttcctgcagcatgcgactgaagtcttctacatgatttccacgagggagtttccgaggtctgcgggcggtccagtttcgtcgcggaacagggatagccgttgcatccaacattaaagtaaatgacgtagggatggggcgatcactggacgagctggaagaggaccgatgagaggattccgatgttttcgataaggcccgggaacgaatctctcgacgtggaggcagagtccgcgagccacgctttggaggaattaccactgggatggtgttgatcgatctgcgggattcggtgttcggggtagagagaaggctagaataatccggcggcgtggatgggttcattccatgagactgaaagggtttctgcggcggtgccgagctgaataggaatgctctcgggaccatcatattgactgtttttcatcacacgaccacggttgctatagagcctcggctttaaccagatgaagcgctctggtcgagtttctgcgcgagatacatggatgaaggggagaagcgcaggaagtgagaagcccccagggagtcagacaagagaggaccagcagccaatccgaaggtgtgtgtgttggcccaaagacatgcaagggaagcggatagggccgtgagacaagggtatgcaggcacacacacgcgagccgataaggtaatagagacgagcgatcgagatgggagagtcgggaggatgaatatgagacaggagggtatgaaatgagcagaaggaggagaatggaaagaagtagagaagagatgaggtttaagatagagagagagataatgggaggaagtgtgggcggtccacgggtggtgatctcagatagataagccgtattgggcaggtaaccgcatgtaaagatcacgggaggtgcaggacgtaatttattttaccgtgtgattgattggtttgtgcggggaacaatgccggcagccggcttgcgtccgattgtaacggtatttcactcgattttcaatacaattcttattactcatggaacattccgccggtggagtccggaaggaaatgactttttatagttagtcatctcgatattttcattttatgccgtatattcgatattatgacatgtacaacatagtatctgcctaaatatggactctacaacgcatgattagcccaatggagtcagacatgcatatatagtatataagatgtatatagatgtatgaaaacgaatcacatccatcaacccttcagatcgttgaatagagatgtgggccctttaaggttgcttttagtgcgatgcgggcagatgcacacggttctctccaggttcaaggactaaaagagaagatgtattctacttaggtacattgactaatgtttgcttcttttctattaactagttaactagttaattaggaaagcaacttggaatgataaatacacatatgtaattggggtcacttgggtagatcggcaggagctccgagactcactccgtatctcccatatttaaggggaaaaacactaaaatggagcgggtggctgcagtccgaaaacgtaaactcgaagagatccgacgtggctagtggagcgccataagcgaaaacaattgcggtgaacccccttttttcttcctatattggtggcttataaatgtggctgttattgtaatttgattcatcgcacttccaattgtgtatcattgcttccggagcaatccgtacggagtcctccgtacacattgttacatatgcaaataagccttgaaaagcaaaagaaaaggggactacctaggtacactgttacctacattcgtatttgacctgttcgaaggattcttatagatgggaaatacacacacgtcaaaatgtcgataatgcgcacaatgcccaaaaacggaaaattcgagacgtggctagtggagcgcggttagggtaattgcggtgaacccttatataacatacgatgtaactatgttgtacaatatatagagtggtttttcccgtcttttggtgagattaggcagtcatgcatagtattataacatgattggctttatctattattcagtctgttttgctggcaattgtatgtaacctcgtctactccgtttttgtctgtaaccaacccaccaagggttgaatccttcagggaaaacccggaacaggtatccggaacatgtatcggggataatatcataagactcacctggcaagtgaagcaattttccctttccttaacaattatttcgatataatcatatggaatgagcctataatagacaaaactacctacaatcgtatgtacgtgtctccatgttgtaactagagccgccacgtgaatacattagtcagccacttatcgaaatggacatcccacactgcacagccatccagaggccggcgataaccacaccctgcgtcgtcgctcccaaggtgcttgcatccaatcatttcaagagcatcatcaatttctaatctcgccaaaattctgcactgggcttgtccccgtctccactgcgggtcattgcaatcgtggggtacatgattcattctacaagtgccaggcctgtgtaaatcttcaagcgtagctggtgcgtccatattttcttgttgtaaggcgcaatgtccgatctgagcgcctggctaaacagattgaatcgccatggatggtccgatagactaacatgccgacatagccaccgtgtgcaccctcgatgttctactaatgagctttgtactctaaaacatggacatcccatgtcgaggtttggaccagtcaccggcaaacacgacactaggcatgcgaacaggccccgcggagaaaccaccatactcagttcttgaatcgcacctatcaaactatctgagatcatgagtaccgaacgtgcccaaccgtctaaaagacgatgcgtcagcacagcctgtgtcgcgtgtcgcaaaaggaagtcaaaggttgggctttcgaattctgatgtcgaggtgtcacattactaatatctgcacgtagtgtgatggaaacctgcccagctgtgcagcttgctcctcggtatatcatacaccttgtatgtatctcgtttacagagagcaatacgagcattgctgactatgtattcataggtgtatatgatcccaactcggatcaccgccgcaaaggtgtctacaagaaggacaccgatacattgcgcacccgaaacaccaccttacagacattgatacaggcaatattaaactacgacgaagcggatgctttcgaattagtacgtcagattcgctcctgcgatgatctcgaagatgtagcggcttcggtgatcgcccaggagaaagggctcatgtctgcggaccaaacagcaaaggagtcagccagcaatgagaatgcggctgagatagatcaattcgagtccgagctggctggcaagatgagtgagctcatgctcgacggttctcgaaaatttattggaggtacctcgaacctcatcttcttgccgccaggctccgagttgcacgagtctgcttcgatccaaaacaatttcgtcctcgatggtaataatcaaacacacgctgtgagccgctggacagaagttacagacgactcctccctaatcagtcatcttatgaccatgtacttcgcatggcattatccgtttttcaccatcctagctaagaatatgttctatcgggattacatccgcggtgtctctagttcatattgctctgcattactcgtcaacgctatgctagccctgggctgccatttcagctcatggcaaggtgcttttgatgatccccagaatcttgcaacagcggggaatcatttcttcaaagaggccaagcgacttgtattggaaaatgacgaacatgagaatgcgaagctttgcacggtccaggcattcgcccttctgtctgtccgagaggcaggatgtggccgtgaaggaaaaggctgggtctatagtggtcttagtttccgcatggcttttgacctagggttaaatctcgattcggcaaatcttggggcgcacagtctcaccgacgaagagattgatgctcggcggatcaccttttggggttgctatctcattgacaagtcagtctccattcccttgcttatctccaatgcatctctaacactctacagatgctggtcaaattacctcggtcgtcaaccccagttaacctcgactaactctaatgtacccaaggctgatgtgttgccacaagaggaaatagagttatggtcgccatacactgatgctggagttggtcacgagcacacgcaaccgtcacgaaccagggctgtcgcgctgcagatatccaaactgtgtgagatcagcagcgatgtacttgtgctcttctaccatccaaccgaactcgaaaatcctcagtccaaacagtcggaactgaagaaactgagtggtgttcacacccggcttgaggcgtggaaaaataacctgcccagggaactggtggcaaaagacggacagctaccacaagtgctcgtcatgcagtaagttgacacctacgcacaaggcgttgcctcagctaactcttggctcagtatgctgtatcagcttcagataatccatttatatcggccattcctaaagtataccaaggctaatactccacttccttcccatgtctcacctcgcaagatatgcacccaggccgccgcgactgtttctaagctgctgcgtatgtacaaacgaggatatggactgaaacagatctgcaacatcgccgtctatattgcccacactgcatgcaccatccatcttctcaatctcccagacaaaaatgcccagagagacgtgatacacggcctcaagaacctcgaagaaatggcagtgggttggctctgcgctcgacgtaccctccgcatcctcgacatatccgcaaataaatggcaagtagagctaccacccgaagcaatctctatcttcgaacgaacacatcacaaatggggctcctggggctcctgggaccaagcgacttccccctcaacatccgacgactatcccatcccaaccatgccacacccctctacaagcccgagtcgattctcaccgtctgggctgccattcccacattctcacaccgagcccatcgccatggccgagacaccaatgggccctcaatacggacccctcgccaccgttccgatatcgttcccctccatgcaagggatgaatccacctcaagcccgacggcccgagtttgcccttcccgaaccaacatatctccggccccaagtcgcctaccaattcaaccccctcccgggatccgttccgactccctcttctcctcatccggacaactggtacgatggctctggggctcatatatcaccccaaaacgcaacgccgacatcggttgcatcgcccgtgtctgggtatgacggcacggaaaacctggtcgaggagagccatgactggtggtcgagaaatgccaacgcgtataacatcggcatggatggttggagtggtacttggaatactgctcctcaaaaccagccttctgtcattcactaccaggatggtaatctcatgtctgttgctcagccttctagttctggcgatgagcagttacaggccccggtgaggatgtcgacagtcgggtcgcccgatgacacgactgggtatgggagtaggtgggaataatgcgtggatttggtgatttttgacttatgggaacatatatcgtgcgctttttgataccacttgaggggcttcttatattttcccggcgtttatggacatgccatctacaaatttgtttctgttccgaaatcttacgatcaatttacagacaaaaacattcattgtcaaaagatttgtcatagatgatcattagttctcaaaaaccagaaccaaggtgcaaaaggctacttcccgaatgctgcttgaaagagaaagatataaaagaaaaaaaaaggtgcatgggatggtatcactaggcattgttgttagtacaatgatatcagtcaagacaacagaaaagaaaagaagagcttaccaagaaataatcagcgacaggcttcttcgcgggcatgccccgcgtatcctgcgctgcagcctcaaagacacggtatctccttcctgggctgacgactctattatctgcaacaatgccgttgctccgaccatattcaccgttactgcgagcgacagtgccaccgccgctggtgtcttcacccagctcaaggatagcggcaacattgccgcagcggtagcagtagttcggtgcagaccagacagtgacgatgccaccatcaaacatctctttatatccctccatcacaagctggtgtgcacgcgcgacaagagacaagccgttgagatggttgaactgtttgacgatatcgccgccgaagaggaacccagctccgcgcgggctcaacccccagccttcgatctcatccgggtctgaccagagcagatcgcacatagcaccttcatgtggcacctcttgcttgcggtcaatcagtcggattttatcgacagagtcaatgagcggtgataatccaccgtgtacacagagcaccgcaccagtccggctagtcacggcgctgccgttaccatcaccactcgcgcccgtgcccggtgcacccgatcgtgagggcgcggcagcctggcctggggcggcggatatgtctcgcggcggggagatatttctggaatctgtggatgcttcggaagaggaacgctgtcgcgggcggtatgtattcatcgtgaccacgcctttggaatccaatacttctatttccagctcgtcttcgtttgatgatgctgaggtgggtactagctctgagcttgcgcctagcacaatcgcgcccagggccaggtagtcgaatacttcgcagcaataccgccatacattggcgctgccgtattttcgaatgcattcgtcgtaaaaaccgtatactgttgtgatttggcgtgattcgtggttgccacggattagggtgatgcgatcggggtatcgaactttcaagcaaaggaggagaaggaaggattcaagggagtagaagccacggtcgacaaaatcgcccatgaaaaggtagttggtgtctggaacatcgccgccgacgcggaatagttccatcaaatcgtggaattggccgtggatatcgccgcaaatggtcacgggagcgtcaacggacacgacattgccttcttcgatcaagagctcacgtgccttgtagcaaagttcgcgtacttggctttcggggatcaggcgacaggcccgcagctgctcgatcgccctgttagaaacaaaacattagtttgacggtgaacgatggggggctacagatttgaggggttgatgccataccggtctaggttactcatcttgtcgaaagagggtgaaggggggaaggaaggaggaactgttatcgaagtcaagaaatccccttaaatagaaatcagatggctcagttctccgaaaaatacagtcccatcttcgcgaagctctgatgcgcaacgcagaaacttgggggaagcggaatatccaatcacgcgggagccagataagattagatgcacccgaagcccttcgctctcgtcttctctccgcactctttcctttgtgaccctttacatctgctattggaggtttaaaagtttgtcaacttgaataattctcactaaacattcaattgaccttcttttgcctgctattccttctcttcttgtccgactatacccgcctgcctactccgagccctccgatggcctgaaaaatccaagaaacagtcggccacgcctacctcgtctcaattgaacatcaatactcgttctctctcagttcacacacaatgccaccacatctacatcctcggtcgcggtcaactaccggcctattcgccggcacccttctcgcatctctcctagttgtgggaatgccgcacgtcttcccttgcccggccccacgacgtacctttgccgattcggagatgaccatgacagccaatggacaacaaataccacgcatccgacgcagacgacggaaggatggtgaagtgggcccagatgacatccagctgggtcagcctatgccagatgttgtcgatgaggaggtctcgacattccttcagatgaaggcggaagcagagaaactctcacacatcaatcgagaatgtcctgtccccaaacccaagggtgttattggggaattgctgggcttccgcgatatccatgcgaatgcccaccaccagtcaaccgccctgtccgaaggagaccaatagtgcgtgcacatcgacactctccttcgatctttttgcactttgttttctcggcttgtttaatgataccatggaatttgacaataagggtttggtggaccggtgaatgtttggaaaaaaaacaccctgcgagctagacctacaacatgtattctctatgtatagtgagatgtataaaagaaataccaattatattaagactagaaatagttgaaattcagacaattgccttacccacaaggtgttacccccaccttaaatgcagttagttgcagacatttatttagtacggcggagccagctccagccaccttgaatatttttcccgtcaaccatcgaccgtatctcgccatggcatcgacagacaagagcttcgtctacgacgtgctcactaatcagcgtcacacaaaatggattgcagctctactcattctaggcgacgcgttactctgcactctcgtcatatggaaaatcgcttgtaagaccgcgtccattgggtaccgaaccagatctagctaaccaagcaacaaccccagacactgagattgactggtcgacatatatgcagcaagtttctctatatatctccggtgaacatgactacaccctgatcaaaggctcaaccggtccgctcgtctaccccgccgcccacgtatacatctacaccctcctctatcacatcaccaatcaaggccgtgatattctcctcggacaggtgctcttcggcctgctctacctggctacactggctgtggtagttgcctgctacaggcaaacgggggcaccaccctaccttttcccgctccttgttctgtccaaacggctacatagcatattcgtcctgcgtatgtttaatgatgcggccgcgactttcgctatgtggctcgctatctacctgtgtctgagacgcagttggacggcgggaattgcagtgtggtctttcggggttgcaattaaaatgacacttgtgctgcttgcacctgccattgcggtcatcacccttctcagtttgggattggtgcgaagtctttcgcttggagctatggctattcttatccaggtgggttcttctcaagtcaatgagttctggggagtgggctaacgaaagaaactacagctcctgcttgcacttcccttcctccagacgaacagtacaggctacttttctcgggcatttgagctatctcgccaatttgtgttcgaatggacagtgaactggcgatttgtgggagaagagacattcctctcaacggagttctctgtgggcttgctagtgctgcatttatccttgttggctatcttcttcaaaaactgggtaaagccttcagggtcggacatggttcccttcctcgaagaaactctccagggacgccaaaagacagttacactcccaaaatccttcactatgaccgtgatgttgagctcactggccatcggaatgctatgtgccaggtccttgcattaccagtttttcgcgtatctcgcgtgggctaccccatttcttctctggcgcgcaggtctccacccaattcttatgtacgccttatgggcgctgcaagagtgggcttggaacgttttccccagcacaaacacaagctcgacggttgtggtgttgtcactcgcggtccaggtctttggcgtgtttttcaatggataaagcgaggtagttaagaagattgagaaggggagcaaccgcggcaaggcgattgtccaaaaatgagagatatcctggccccaattcatactgaggtgtgcatatttcgagaatcattgttgatagcactgaatcctgtgtaccgtagcaaccattgaacaaacgcttgatgcctttgaaaggcgatcattcagtctgattcgtccgaggaaggcatttggcctacacgagactcctcttcgtcgtcagagtcagcagccaatacaacgggttgtttcacgaattccttaggcctgggaaagcagttccagttagcgaacgagtccaggcttcttaatcgaaatcacataccaaaagcgagccttcctccaagccttctcgtccctgacgatattgacaatttcccctccaattttattttcccgctcctcctggcccttagtatcgaccacgaggtacgaactgcgcttgatccagatagccgagcggaatcgtgcaggtaattcgacgagcatctgcttcttgtctgtctgttcgactaggtagatgttgtttccggtagctttgattgctcgcacgatctgctgagtgtcggataactcgtctggaggggtcaaggttccctctgccgtagccatcatctttcggcgaggcggtcccattgttgaagatgtaaattgaaatttatggtcacgaatgcagagatcgagtgcaagagaaagttgggaaccttggaaggaaataattctccggaaattaactgatcttatcggtggggcaggtttcccctgcccgcattactccagttgcctcatactatggccttggaagattgtgccggtatgggatcaaatcagcattttgaaggagaagtttactcatttaatgttcctccgggggcttgggtctacggttatatctgatcaggtaccaaatgcggcaatattgaatatccttcacaagaaggctcccttgatctgcaagcttctctcttccgcctaccaagtcgtggtcccccaagacgaactaaaggccaggcgtctcagactatgaattgaattgacgactttggactcagttcgcgatgtacctcgtgaacttcggcaatatcatggtagtttgacacaccgcctttcagagccgcctcgcgttgttgtttaatctgcatctttgtgagtggtgtacagtcaacatgcccaagggtcccaattcaacaaatggacgcgtctccaagacgtctgcccctactcggtattgaatgagccaaatatcgccgcgttagaacgagagatcactgcacctactgatcaagtgcaactaaacacgttccggctcgtccagctcgtgtagctcccaattcacttgatgacgtacaagagaacatcttgattcagtggaatcggcaggtgaaggagctattagctcttcctatggggcctctcatcaccataagcgcaaaccaaattcttaatggagatgggaacgacaccactgtcagcaaggcatgggttgatcgcttcatcaagcgcctgccagatgatctaaagccacctaaagcacgatcagtcaagaaaaaacgtcttgatgcatcagatcaggagactttggaacattggtatggacgtctgaaagctgtcattgccggggtttccccagaaaatatctacaatttcgacgacaccatcttccaaattggcgagggagtgaaaccccaaatggtcgttaccagtatgggattgggattcgcctctcatcaaactagaacctactgtgaatggataaccaccatcgagtgtattgccgccgatggatgggcagccgatccatttatccttattcaaggcgaccactattacgacgagtggttggaatacggaggagctcccgatgaagctgtattcatggtgaacccgagcggccgggttaaagagcaggttgcatgcgagtggatcgagtgtttccatcgccagaccaaagatcgcactgcggacggtcaatctcgtctcctactcttcaggggccaacctcaatatttgagttacaagttcctcccgttttgcgagcaacacaagatcattccctttagctttccgcccaatataggacatctcatacagccttttgacagcaaacctttcaaaaattacaagcagtattggagaagtcaaggccttattgcttacatgattgacgatcccgatgatgagaaaacagccttcatcaatggcctccctaagatccgtgaggaatcattcaaacctcaagtaatcacggacgcatttgccgacagaggcattgtgccatttgacccgtccaaataggtcaaccactttgagaaaccccctccatgatggcagacgcgctttattatagataggatttcaccaccaggagaattatatgtttcgtatcctactaggtactgagaaaatcaagattgggatgaattggtttgtttggatagcatgcgtggattattacgcgtagtacgcgtggtattggcgcacaaaggataagatataggatctattcattgcggtttcactcgataactagtccagcgtactatgcagatagataccttccgttacaaatgttcctggaacgtgattagaatccgataatagggtgcaatatagaccgaacccctgcttcatattattgtctccagcagaagaatgatcttacatttcgccaaaattatatatcatcacctcattttcattagctgacaaatgtaggatctaatgctccataaatcgggcttaatctgcacgataatggtagatgtaagattaatgtcctatgcattcaattcggagcattggccttgcaatgtatctaccgtgtctccatccattggctgtgaaacgagtgacatcaccattctaagccgaaaagacagagagacgactaaatcatcagataccaggatctccctcaatgtatacagtaaggggtgagtggcacgatctctgtgcccgatgagaaatctgacaaggcggtgacacttccaattataatattgtacggtgaagtgccaagtgtgtcgatcactggtcaaaggcttcggaagtatgtgtgtcctatacgatgtcgtgtgtctgtagatagcctacatagggaagagtatgcccgatttgggcaatccataagcaggtatcaccacgtacatatgtagacatagctacatgtatcttaatctaagatatagccctagatatatgcacatgtacctacttcgtatgtatggactgttactactttgtgctctaacccgacttttcgccacttccttatcggaggtgcgtggtagtacggccttcccaagtaactcccgcgtgggcttcttccctggatctaatccatcggggaaaattaaacgattctctttcttcttacctccatcgatctctttctttcatctgctttttcctggattttatcaatccaatttcggctgtaaaccaactgggcgatcatcgcgggcagtctgtctcacattttccgaagtggcattagttacccgtgcccgttgcgccccttgtcaacaacagccccgcgaatactctcccaccaacaacccactttgacctggcgcaagcgcacccttgaattttgagctagccttgctctttgccctcgtcaaacctgtcatcatggatggggacgagctgatcgcctcggtcttccgcaagatcgagcgggagaaggccctcatcaccgctgccagtaacatgcggcagtcgaccgacaatcccctcgtgcaacagagagtcgatgccaacattcgcgatggtcgcaagaatatcgcttatttggaggagaaaatgagggaattacaaattcgccagatgaaccaggaaggaggcccggctcccccgcccaaaggccatggcgaaggtgaacactacactcagggcggctctggctcgatgccttccggtgccccattcgccgatcctcgaccttatgctccgatcccaaaggcgcggcccaattacacgaagctaggtacgttcttacatccgttcggaaatgctgcgctgagcttaaattgcttggaatgctaatatgaatggcgatgtctcagatctgatcaagtatgacactccgtacctcggaccgaagatccagctcatgctgtcccaattggagttcaagctgagcgtggaaatgcaatataaagccggtattgaaaagatggtccgcttgtaccaggatgagggcgaccggaagagccgagctgatgccgagggccgtcgcattgagagcaaccaaaagattcagcttctgaagcaggcgctcaagcgatacgaggatcttcatgtggatattgaatcgggcgatgcgccagacggtatgagaaatataacaattttgctacaagtataacgcgacatggttactaactggtggtacagatgagagtcttagtactccgaacatgcgcaagccgctgacgggtctgctgacaatgcgcatccatgcggtcaaggacgtggaccatgcggccagttcgcgattttctcgaggaccggagacatacattgtcgtcaaggttgaagacacgatcaaagcgaggaccaaggctacccggaacgataaatggttagacgaaagcttttccatggacatcgataaggcaaacgagattgaattgactgtctatgacaaggcgggagatcgcccggtaccaatcggtatgctttgggtgcgcatttctgacatcgcagaggagatgcgtcgcaagaagattgagacggagctcaacgcgtctggctgggtatccgcagataagatgggcgatggtggatcccctcgacatgatcaggctggttctcctatgggatcttcacatggccctggctccggaggacgaccaggcacctcgggacatggtgcacatggacacggtggcgagagctcaaatgctcccccgactgtgacgatcgattcatggtttgccctagaaccggttggccgagtccagcttcaaatgagcttcggtaagcctaatatgcattgacccccgaagaagagaccctatgtgctaactggatatagccaaacaattaaaagaccgtcgtccctttgacattggtcttaaccgtcaaggtgccgtgcgccaaaagaaggaggaggttcacgagaagcagggccacaagttcgtcacccagcagttttacaacattatgcgctgtgcactatgtggagaatttctcaagtatgctgccggcatgcaatgtgcggattgcaaatacacctgccacaaaaagtgttaccccaaggttgtcaccaagtgtatcagcaaagccaattacgagaccgatccggacgaggagaaaatcaaccaccgtattccccaccgattcgaaggcttttccaacatctctgcgaactggtgctgtcactgcggctatctccttccgtttggacgcaaaaatgctaagcgctgctctggtaggcaatattactgacatcgcagcttatttctagtccatgctgacctcctttacagaatgtggtcttacgtgtcatgctcagtgcactcatcttgtgcccgatttctgtggaatgacgatggaagccgccaaccaaattctagagacgttgattcgtaccaagaatcataacaagtctgcctctgttagttctggcctcagcaaccgtacccttcgagcaggcggtcccccggggccccctcaagacaacgctgccctctcctatccccagaaaccgatggaaggaccctacgggtctattcctagacaaccctccgcagaagcggtaagcgctgccactaactccttcgcaaccccacagtcaccaacagctgctgcacaggctgcacagcgccaacagattccaccgaaatcgcctcctggaccttccgccgccgctgccgccgccgctgcagctaccgggctacgtagcccccagcaagccccaggtatgcaactaccgattatgcgttgaagagagactcttggtactaatcaaatcttagctgaaatgggccgtcctatgctgccaccccaggcacccccgcagcctcaacacgcccattatgacccgtccgcttatgccaatttcccgcagcagcctccaccccaggctatggcggtgcagcctgcggcttatccaatggcaccacctccgcagcccatccagcaacagatgccccaacagcaagttgcacctcctatcaaggacgatgctgcagcgcaggcaaaggctcgcattggattggatcacttcaatttccttgctgttctcggaaaaggtaatttcggaaaggtcatgttggctgaaacaaagagctcccgcaagttgtatgccatcaaggtgttgaagaaggaattcattatcgagaacgatgaagtggagagcaccaaatccgagaagcgtgtcttcctaatcgccaacaaggaacgtcacccattcctcctcaacttgcacgcttgtttccagaccgaaactcgtgtctatttcgtcatggagtatatcagtggtggtgatctcatgctacacattcagcgtggccaattcggtctcaagagggcacagtaagtcctacgcttaatcttggttcttttaccggttggaaatgctcacatctctcaggttttatgccgctgaggtctgcttggcactcaagtacttccacgagaacggtgtcatctaccgtgatctgaagctcgataacattctgttgaccatggatggccacatcaaaattgctgattatggtctttgcaaggaaaacatgtggtatggcggtacaactagcacgttctgcggtactcctgaattcatgggcccggaagtaagtgggatcaggttttattatgtctttctgcagtaccgatgagctaattttgtcatagattttgctggacaagaagtacggacgggctgtggattggtgggcgttcggtgtcctcatttaccagatgcttttgcagcagtctccattccgtggtgaagatgaggatgaaatttacgatgccattcttgccgacgagcctctctaccccattcatatgcctcgcgactccgtgtcgattctccagaagctgttgactcgtgagcccgagttgcgtctgggttccggtcccaccgatgcccaagaagtgatgtctcatgccttcttccgcaacataaactgggatgatatctaccacaagcgggtccccccgccattcattcctacaatcagcagtcctaccgataccagcaacttcgaccaggagttcaccagtgtgactccagtgctgacccctgtacaatctggtaagatctttattatctgcttgctgggagataaattttaactaaccgatcctttttatttagtgctttcgcaagccatgcaggaagaattccgcggattctcctatactgccgactttgcttgattccaccgacgtgtgatcgggataattattgctcgcttggacacctgtcacaagttgttgacgagagtgttaattcggttcatggggggtttaatgccgacacgtccggtttcttcagggcgctgcgggtcctccgccctttccagcacttctcgctcttcaaattgcttcaacatacccaatttcagtttcgtttttaagtgcaggcggacctcactgacatgcttcgatcgccggataccatggttaatgaaaccttcaggttgcttttgctttctcgatttctttgtgtgcttatctaaattgcttgctctatttttcccctctcgagttcttttgttctgtctaagttttctttccgactggtcgggtttatgactctattctatgtcgggcatttgatgtccaaaaatggagaaggggcgggttcccatatgggaactgtgtgaagtggttttaagagagtttgatgagaaatgacgaagtttgaagatctatgaagatagcgtaggtccctccagggactcgtgcgcgttatgtccggttttatgttctagcggttcgtggtatgaagagagggagatacaaatacgaaataatatatcccatctgtctattttgtagttggatcacggttttatattcacttgaatctagattcacatgtgtctgcccccgccccttcccagttgagggctgccctacctcgttccttcccaaataggaagccaaacgtgccttcctctcttgcgagagcacccgttttgtttgtttacctttgtcctctcttcctcacctctctacttccctacttcttctttttcaatttctttttatcactgttcatccaaccacttttctttgttccagaaatagatcaagctaccgaggtctatttcgaagatgctgccaaagattgaacgcctgtttcatcggggctatcgggccttgagtaaatcagtcgggaccgtgacttctaacaacaaagagaacctgccttcggtaaacaaagaaccctcgccctcgggcaacaaagaacacaccccaaaggcgagccaagtgccgtcaagttcccaccccatcaggaaatggctcaaaaacgtgataaaccctgtggatgggtctcccgcaaacaaggtgagacctaaagtcgatgatattgacttctacatcgacttctctgagacttcagaatcgagatccaccccggcctggtctaacgagacttgggataaccattagagttccgtgcaactcatcactccccccacggaccggacactatgatccaatcacttccttctccctctcttgctactccggtccagccacaaccgacggttgaacctactcctctcgaccgtccttccccgtcgctgaacactctttctggcacgattattcagttcagcgaacatggtcggattgtaagttttgtctttataatggcttattacatcactttaaccttagttatctctctcttacagttcttttctcacttacatattactgactcccataccaggcgacctcaaccaaagaaacagccttcttccccgaggatacagagcctcagtatctggctaagcaagttaagctcgagccacaggattctgttacaaaacgcaagcggtctgaggacactgacgtcaatgaggacgacaaatgggactccgagccgcccacctcacctgaatacaatatttctattgcgagtgatggtggtgatagcgataccagcgacgcttcttcatcaccacacgcgaagcgagtaaagagagctgctttacatccctcggtcaagagcggccgctcgattaagcccaaagtcggaaagaccagaaggaagaagaagaagggaacatgggattcggataggtcaatgtctgagccaagtgacctcgacgagagcgaggaagaatacatcattccgacaggagagcgcgatgagctgctcaataataagctgacccgagaaagagcaaagcgcctacttgaagcagtagaactcccccagggccacgacctgtcaccagacgaacagcggactgctcatcaacttcttactcgtggctgcatgccaactatccaccgacattgggagaaagatttctccacccttccagagtccctgttcttttctgggaaagatgatgaaggtcaacgtaatgaatccaactttatccttgaaaacgataaatgttccgagttttacgcgatccgcgcattccaagagcttttgaagatatgtggtaatgtgagggactattgcaatatccttgacatatgtcctgcaatctacatcaagaagtcaatagagaagtacttgcgctgggcattgagcgatgccggtgtcagggtccagccgaacacaccccctgtgcacgttatctatcgcaaacctcaggacgaagagccaaaagaagcctttaatagagttgccaaaacattggaggatctatcgaatacctggcagagccaactcgctggaccccatgatggtgaagaagcctggccggcattgatggggctcgttctctgtgggcctgttctttctgtcatctctctggacaccaatcccaatccgcaaaccctaacacacggaatcaagttccttggtcatttcgacctttcagatttcgataatgatgtctggaacaccctggctatcgcgatcatcgtcatgcacatcagaaggaccgtgaccaaactcgcaaaggcctactatcacaggtttgtggcctcgatctttgatggccctgccatgaatttcccggatcctgatcgttaattctcgtcatgctacctcgagatctatgagactctctggctgcaactacttttagcatgtcacacagagctctcgaaatatatatcaaacaaagcttgggaagggaacagtatccatggtcatcctcgaggattcctgcgaattcgatcagccgtaatcactccgggtttagttataggcatgtctttctcgggaattttcgaaccctcgttagaatctagcgcttgagtcatggccaattagttcactgaatgacgtgctataaccttttcctatacgtagaacaagaattgtcgtgcctcgtgtctttggagtttttttatcattagatttcctcctattgtgctatgttgatagatgataggttcacaattacgaatggatgtatggcatgccagtggagctcagtccttgctatgtagaagcactattgccaacggaagtgtcgcgaccaatgcaaggattgattcgtcaaatctccacttttgttgttgaatacttgtttttccctttctgttttcaatttgaaccattcttgtcattgcatcccaatgaactcaatataaagaacaatatagtgtgttttcacgaatccggagaactcccggcgccctaaaaaaatcttccacaatgatctccgaagaccatgggggtatagaatactccccgttgctgcgcaacatcgatccagaagcggcagacaattccaagaagtcaggatggcgacaggaattagcgattatctcgcgatattcagcccccctaatgatatcgctcctacttcagcatgcattgaccggctctagcatcttcatggtgggccatctggggaaacgagaaattggggccgtgagcttggccaacatgacttcccagatcactggatattttgtctttcaaggcctatcaacatgtttggatacgttatgtcctcaagcatatggctcagggaatttgaccttggtcggccttcacgttcaacgcctgacgcttttcatgatcgtcctcacaattccaatcggggctgtatggtggaatgcggatcgaatatttctcctcatcctaccgtctgaagcccaggagacagctcttcttgcagggctgtatctgaaaattgccatcgcgggcgctcctggctatgcttgctttgagtccggaaagcgatttttccaggcacagggattattcagtgctagtctgctagttcttgtattatgttctacgttgaatattttcatgggctggttatttgtttgggtatattattcctccttagaactccccgagccatccactgatttcccgttcttttccagagactgcaatggggcttcgtcggtgcacccatcgctgttgcagtcgcaaatagtcttctgcctatctttctggcattctacgccatcttcattaagggctctgagtgctggcaccccctttctgccaagatgtggcgcagctggggtccaatgttgaagcttgctataccgagttggctaatgatcgaagccgaggtccttgcgtgggaaatcatgacactcatttcgtcccatttaggtgcgactgagctcgcagctcaggctgctatatcgacactttcagactttgcctttcaaatctcattttccatcgccgttgctggtggcacacacattgcctatctgattggagcaggtctcccacagcgtgcagcaacatcagccaacgttatggtttttgcgtccttcggtgcgggcataacaaatatgcttgtgattcttgctctgcggagcgtcatccctggcttatttagtgatattggagaggtctggcacttgatcttctttttgcttccagtgggtgccgtccttcaaattcccgacgccgtggccacttccctcaatagcttgctgcgagctgtgggacgaccggatctgggtagctatgttcagctctcgatctactacctcgtcggattgcccctgggcattgctttagcatttggcctaggttggagcgttttcgggctatggtgtggaatttttatcggccaatcgatcattgtgttgatcgagggtttttatttctggaaaatggtggactgggcgaaggcatcccgagaagctgtagagcggatgtgatcatggaaagagagtttcaaaagccatgaaatatatcatggcatgtacgacgaatataaaacaacaagcaccggccttgttatgtttttggttagactttttttccataatattctcttaagagctcaacgggaaaaggtgtataccctctcctaaagattcttttatctcttgtttacttgtaaatctacagaggagttcgtatggtgagcgaaataacaaacctttatatacttatgcgtcacatgaccggtcccgctgttgacgctattcccaacaccgcaatcttcaactgcatcacccagcattccaccatggatgccgccgaggatcgagacgtgaagcttcaacgggcctctggggatttggtgtccgagttttcggcaaagctgcccttgctactgtggagagcccaaactaggactcccccccgcaccccacgtaaatgggcgcaggccaccaaaacagagaagcttgttagccttgtaagatgcaccacatagctccctcttgattacgtctctgtgtgaatttactgatgttatctgcagcttgaaccctttcaagagtggcctcaactcttagatccacatttgcagacattactgcctcctttagtggacgcttttctagcatatctgatcaagcaccgcacccaatatggctctgtttcgccgaagtcatcccagataggaaaattttatcccctaccaagagctatctgcaggctactttacactttttgcaaagtccgtggcgtcaaagtggttagcaggttcttgaacaatgagccgaaatatcttgattcaatgattcgggccttcatcgaatgggatgaggtcagaccatccaattccgaggaattggtcgaatccgacacccagcgactcatctgggaagaacgctatgtgatgctggtctggctttcacatcttctgcttgctcctttcgacttgtcttctttatcatcagatgacattccggtgccctatgacaatctgcaacagttggcttggctaccatctgaaactcctatggttgctaggtcggttctttccttgtcgttgcactatattggtgcatcgggcaaagaacgcgaggcagcgacagcgcttttggcacgattggctttgcgtggagatatgcaagctctaggtatgcttacaggtctgacgaagtgggcttttgctgtcatccagccgacggagaatgtcgaaccaccatctgtctatgcttgtattggagtgctcacattcattgctcgcttgggtgcatccggccaggtagaagactttgctccattgatcaattatgtcttccagcagacttccagtgtattccagggaaattctccaatctctgcgacaatccagtcttcggcgttggctaggaaaattgttgtcaagatccttcgcaacatcacaaccatggccttatctttgaatgagcgaggtgaccgccacatcacggatgatcagttatcaaccatattggaagatgcaatcgatcatttcttggtctccttggccgacaaagatacgcccgtgcgatttgccgcgagtaaagcactcagcattatcacattgaaattagaccctgaaatggcgactgaggtcaccgaagcggtcattggctcgttgggggagaacatcctcttcgaaactgatgatggctccctcgtgactccatttgaagcacggaagattggtacacacacccttaagcgtaatctcagtgcagtcgatgcccagcgatggcaaggattaatcctgacactgtcacatttacttttccgccgggcacctcctattcaccaactccctgaaattcttcaatcacttgtgtcgggtttgtgcttcgagcaaaggtcttctactggtggctctatgggaactggtgttcgagatgcggcatgcttcggtatttgggccatgtctcgaaagtatacgacacaagaacttctggcgttgcaaccccaggtagtggcgtcacaatctggcaagaaggaggtcgatgttctgcaaaagctggccgtggaactcatctgtgctgcctgtatcgatccgtctgggaacatccgacgtgggtcgtctgctgcgctacaagagttgatcggtcgtcatcccaataccattgcggagggcattcccctcgtgcaggttgtggattatcatgccgttgcaagacgttctcgtgcactaattgatgttgctaaagcaacagcctctttggatctgatttactggagtccgcttcttgaggctttgatggattggagaggtattggttctccagatgccgagtcccgaagatatgcggctaagtctattggaactttgagtactcaggagctattcaaaaccatgaatctggttttagagaagttgctgcaaatgttctccagcatctctcgacatgatgtggaatctcgacatggctgtctgttatctattgctgccacggtcgatgcctttacctcgcaatgggaagcatcaatggagaatagagataccccggaagccagggctgtttcatctcaagttgccaatatctgggatatctttggttctgcatcaagccctaccgatgatgacttgaccttacatacttcacgccccgagttgacagcagaggcatcatcttgcttgatctcctcactatctcggtctaccaccataacaggcctggctcaaccttcagaatcacttctgaaccgaacactgcacattctgtcgctctgtgtttctcggagcgatgatatctcgattgatgcatcttcgaccgccttggcacagctgttccctctcctatcaccatcaaagcaggaagaaactgtgcgtacttggttctctcatcttcgtgattcatggagaatgccgacgggtcggggtcaaattctagcacttggtacagtgttcaagcaactcgcagcacaaagtgatgtccaagaaaacatcatcaccgagattcttcattacaccgggaaggaagaggttattgagaaaagagttgctgctgtgaagtgcttggccaccggtatcttgccatatatgggtaatacttcttgttcactagctggtacgaaaaaggctaacaagatcttagctactactaatactgttgcaagcaactttgtcgatttcttgaatgattacaccactgacagacgaggtgatattggatctcttatccgagtcgaagcaatacaagcagtcggcatcttgcttcgaagagagttggaaacaacaccacgctcaccacttattcatgatctggttgggtgtctctgccgccttgcatgcgaaaagctcgacaaggtcagactacaagcatggctctccctgcaggacttttgggaatcagcagcggatctacccccacttgaaaggtaatcttaccgataaagcaattatttgatgacggtgctaacaaaaacaggaaatttgagcacttcagtcatgtttcgtcacaagattactttgctcagttaattactctacaggatgttgactggcttcgtcttcctttgttacaaggacttgctacctctgctatctcgggagcagaaggtctcgtccgagcatctcgctcggctctgacccagttcctcaattctcaatcccaatcccgacgccaggagatattgatggtcttcttgcaggatcttgctacagttctagatgacaaccttcaagatgaccgttttgccattcctgcagtcgagtttgttgcattcttgattgatagttacattcctgttatcccggaagcctcagatcctaggtttgtgaccttgtcttcgttgcttatatatctacatcattccctgacatcttctttctagtttccgaaagttgttcacgctggtccagaaagcacatttcagatccgcaaatatagctcgattggaagctgcagtcaaagtttatgctgcattatcaaggattgactcgttacgagggggtgttttgaagaagatgaccgggctgcttttgcatcctttcccaaaggcacgttagatctcatacgtatggatttacggtactgacagttgggttttaggtccgatcaaccgccgcagaatacctgtttgttgtgactgactctgaaattgtcaagtatgaagactggtctgtttcgcctaaacagctgaagccccaggtggataatttgaaggtcgctctgtctttgaaggggtagcagcccacagaaatgtcatgaaactcaaatatgcagcgagttaataacaacagctgaaaatataagatacaaagcatggatggacatggggtgtaaaatctttgggctttggctgtgatgagtactagtacttgtggctgctgtgccagtggcagtacttgtaccagtactcgtggtggtacttgttgtgctcgtcttgctcgagtgatcctccgcaaagaaatcaaatatgtattgagtggcattgaattccgacttacccaacgggcactgtgcggcatttcgggtaaagtcatcattgccaacagtacttggccagcaatggccattgtcactctcacggtaatgctgaacgatgccttttagcccgttgcagtcccaagaagcatgcttcacgagcgggtcgtcaaagacagtcacattgctggtgggctgcgcattgtccgcacatccattttgagccgcccaggcctgcaggacatcaatgacgggcagcttagcatccccgtcgccatcgataggcgccgtcgtgtcaaccgtaccatgaaactccaagaaaggatacccctcatcccgcttagcgggggcgcaagaccccacacccttcatgtcggctgtatcataccaggcgccactgacagccgcaaaagccgcaaaccggcttcctacggtggcgttgcaggcgatcacgctggtgaaaccaccgccattcgacttgcccgccgagtatactctggttgtgtcgatgcagagggtttcttccatgtgcgtgagcagatcgttggtgaagtccaggtcgttgggacgcgacgtgtttgcataagggctggagagccagtatccattcttgctgtttgggtagatggcaattccgtcggggttgaattccgggtttgagaattgtgacagactttcttcctctaccatgtcgcgccccgccccgtggaaggagaaatataccggggttggcgtgttcttgtcatagctggtaggaatgtatagtctgtattcccggtctgtgtttgggagggagagggactcgcttgatcctgctttgggatacttggaaggtatgtcttcgccacagcccggggttttggctatgctgatgctcgtgagggctgcgagggatagcagcgatgtgaggcgcatattgtttggggcgggtgcccaggtggtctagtttcttgagggatacatggcttggcttttatatgggactgggggattgattgagagattgagggattaaggactgaaagatttaccaatacaaaccccttagcctgagcatataccacggaagcccgactgaggaacgaacagagtggatccgaggcacccgccaagactccagtgccacgggcgatctcttatcttttcaaaccttacctttgcgcccaacacgcttaaatgatcgatctacaacaacggaagtcctcgggtatgtatgcgaattattattgccttgaagattagaagccgagaataaacaagacatgaagatccatggatgatctgtccttagtgagcgcttaagattatacccattgaaactttattattcttcatgcatcgaagattggcttcacccatgccaaattgggacatgctaattaaagatgaggaagatcaatggatacagttcaaaaccagataatgtgagatagtacgcaggagttatacccacttcaatatactctgtactgaattataattaggtaggcattggttttagtgtacagtaacgggtagaatagaatatgaaaaaaaaaaagagagcaaatagaaaaataaaaaaagaagtgcatcatccgtgaatcgaacacgggcctcgtcgatggcaacgacgaattctaccactagaccaatgatgctagttcatgtgatgtgaccaattattatgcaagatacccctatctcccttccaatctcatttcatccgcctctagtcaaccagaagctcgacctcgctggtttctagagctccacagtcgcaaacatggctgccgtctcagcagctggtattcccccgaatgcgacgtgagtactatatctacatgctatgtccccatgctaacaagtcttcacagagtatatgtgcgcctgtccctcccctccatcatatcaccactccgctcccgcattaccatactgaccgattgcttccccctattaggtcaagaatctcgacgagcgaatcaagcttgagcagttgaagcatgccctggaggagatcttttccgaatatggcaccattctagaggtcgtcgcaaagactaacctcaaagctaagggccaggccttcatcgtctttgacaacgtcgaatccgctacccgcgctattgaggatatcaacggcttcgatctctttgagaagcctatggtgctggattatgcgaagacacccagtgatgcgacagtccagcgggagggtggcagcgaagagctcgaggctcacaagcggagacgcttagctgagaaaggtacgtttaacagataccggcgcactaaatacaaatactcaatccgtactaatgattgtcgttttacagagcgcaaacaagcccacgaggccctcgaagcacagaagaaactcaagcgtcctgctgccgccgtcgaacccgcacgcccagccaagaccaccaaaggtgccggtctcaaacccaccgctgccgctaccaccgctgtcgtcccagacgagtacctcccgcccaacaagattctgttcttgcgggaactaccagaagacgcaacccaggaaggtctgtctgctatttttggccggttcgaaggatttcaggaagtcagattggtgcctggtcgcaagggaattgcattcgtggaatacgaggccgaggctggagcaatcagcgcaaaggaggctacatcaggcatgcccatgggcgaccagggcaaggcgattcgcgttacctaccagcgacagtagtcgtgggtggtttgttgcatcctacaaaatatcccggtctcgttctttctggcgtttggaaggtcttgtctcaagtacatgtgtattagaaatacggagagctttatggctgtcgtcttgctttcgcaatgcgtcaacattgcatatcacatgaacttcaatattccacaaagtagatgaaacgagtcatagggctgaaacgagtatgagcatataacgtggtacatgtcacggtcaaaaaagaagatgtgaacaagaagagtatcaatacgaaacaaaatagcagcctagaaaatgacatcgttgtcttcctggtcacccagaacatctacggtatctgcctcttcaacgaagagagcaggagaagcagctgccttggggtttttcccttgctcttctgctgccttttgccgggccgcgagaatctcagcgtcggcagcagcaacgtctctctgcttcttgcctgagactttcttcaggcggtagaattcctctcggtcgagctcatcgagttcagagttgatgtcttcagaatggttagtctgtgcaagggacgctggagatagatggtacaaacatttgatggtgttctcagtccgaggaataataacatgctcactgttgtatatatgttagtatcctgaacaaggaccagattcacaagttccgatcttacatagcatttactaatcacgcaagttagataccagccgtaagccgtcacagtccatgagaaaatgacttacctcttcggttgacaaccttgatcacttcatccagaatcaagaaagcagtctggcacaattggtgagcaatattcccatacgctacatagataccacgcatacctgtaagcttgccaattccaccaatgtctccacggcccgtgcatatgtctctcgacaacgttgaatctgctgtcctccctttcctagccctgtcagaccgaagtcattgacaccctcctgcgtgtagctttcaaatgtgggtagaagaacaccagaaacgttctcttgcttggttcgcacgcggaaacgagcctgcttggcagactcctgaatctggtagccgatatctccgcctaccgcatagctcacttccgccagtgagaaggcagcaatctgcatgacccgacccatcttttgtttggcttcatcgatgcggcgtgtaatatctgtagaagtatgattagcgtcttgatagggtggggaacgggaatgtgtcgcatcataccgcggaaacgtctgtgaacaggacagagagtcagtatatactccaagaagcaagagaggcacagggatctgactttgttagagcttcactctttctcttcagtaaactatggccaatttccgcgcccttcagcttgttcttcatcaaccccaatgattggcgagtcggaaatactgcctctcggccctaaatagacgtcagatgaagtcaatatgcgggctcagttccacaatagactcaccacagcgccggacatgattgcagcagaacaaatatcacgatatagtccttgttgttcagcttgagcaacacggccacattcacattggtatgacgccgataaagctccaccgcccacctgatacggatgaagcacgtgatataatcaatgtgggaacctcatccgtcaacagatttggctttctacgcgcatgcctgcagtctcttgtttatgcaattttcctttatgctgacacgttgatcgtgtaattggatttcgctcgactgagtggcgcaatgccagggacgcttttgcccccgagatcccaccggcagcacgcagagatggatcgaccatctgcgtcccggccggacctctacttgatcgtgagttttgacccattggaccatttgaactggaagcttacttgcattctaccactagactgatcaagacatcatttacgaacaagatctgcttcgcgacgctagtagtgtcaagccatggcttgcctatatcgaattcaaacagcaaaatggcacgctctatgagcaagcatttgtacgtcgtcacctaccacaaccgagtccctatggatcataactaatataatggcattcatcaggtcatggagcgcgcttgcaagcagttgccgcgttcatacaagctctggaagatggtaagtgacatttttttttcagaagaacttctaagtctttgctcttactgaccttcgtagtatctggagttccgtacaaagcacttgaagggccgcaatcccatggtctatcgcgccgaataccagaaagtcaacgcactcttcgaacgagccctgatcctcctgaacaagatgccgcgcatctgggaaatgtacctatcattcctgctccagcagcccatggtgacccagactcgacgaaccttcgaccgttcccttcgcgcattgccggtcacacagcacaaccgaatttggagactgtacaaaggcttcgctcgggctgcttccgggcagactgccattaagatctttgctcggtacatgcaaattcaccccgagaacgtcgaggattacatagagcttcttgttgaaaatggtgaatatacggaagccgtgaagaaatacatggatatcctcgacgatccacgattcaagtccaaacatggcaaaggcccattccaattatggtcggagatggttgatctcctggtctcccaggccaaaaagatacagaccggccctcaggtcggaatcgatgttgatgccattcttcggagtggcatcgaacgctttgcggaccagaggggcaagttgtgggccgggttggccacatactggatcaccaagggtaacttcgagaaggcacgggatgtcttcgaggaaggaatcactactgtcatgacagttcgtgatttcactctcatcttcgactcctatgtcgagtttgaggagtctatcattggaagcttgatggagggcgcagccctccgctctgacaagggtaaagccgacgaagatgcagactttgatcttgacctccgcatgctccgcttcgaacagctgatggaccgcagaccattcttggtgaacgatgtactcctacggcagaaccctaacaacgtcatcgaatgggaaaagagagtagcactctggggcgataataagaaagaagccatccaaacctacacggatgccgtttttgcaattaaccccagcaaagcacatggaaaattctccgagctttgggttaattatgccaagctttacgagaacggcggggacttggataatgcaagagtcattttcgacaaggctgccaaagttccattcaagtctgtatctgaactggcagacatctggtgtgaatgggccgaaatggagctccgtgccgagaatttcgacaaagcagtcagcataatggaaaaggcgacacaggcacctaagaaatcgacggtggactacttcgatgagacactgtctccacttcaaagaattcacaagagctggaagctatggagtttctatgttgatcttgttgagagtgtttcgtctctggaggaaaccaaaaaggtctacgagcggatcttcgagcttcgcatcgccacacctcaaacagtcgttaactacgccaatctcttggaagaaaacaagtacttcgaagaatctttcaaggtatacgagcgaggcttggatcttttcatgtatccggttgcattcgagctctggaacttgtacttgaccaaggctgtggataggcaggtcggcattgagcgactccgagatctgttcgagcaggccttggaggattgtccctccaagtttgccaagtctctttacctgatgtacggcaacttagaagaagagcgcggtctcgcacggcacgcgatgcggatctacgagcgtgcaactcgggcagtgtctgacgaggaccgcttcgagatgttcgaattctacatcacaaaatcggcctcgaacttcggtctcacatctaccagaccaatctacgagcgcgccgttgccgcgttgcccgatcaggaggcgaaagaaatgtgtctcaaattcgccgagatggagcgacgactcggcgagatcgaccgtgctcgcgcaatttatggccacgcgtctcaattctgcgatccccggacaaatgctcccttctggcggaagtgggaagaattcgaaataaaccatggaaacgacgatactttcggcgaaatgattcgcatcaagcgaagtgtccaagctcaatacaagtatgtgacccctactactataaaaccgataacacgttttctaacattatccacagcaccgacgtcaatttcattgcatcgcaagccattgccaggagccagcaactccaaacaggggagcaaggcgaaggtgacgatgaccagcgacgcgcagatgccatggcagaattggagcgtcaagctcgtgccccagttggcttcgtggctgcctccagcggtccggaggggggtaaccgtcctccacctaccgcccaagaaccagctactgccgaggctaaccccgacgctattgatctcgacatggacgacgaatagagggagaagttgatatagggtattttgtcaagaggaagggaacatttgatgaagttttttcttttttactgactcgatttccgatatctttgttctttctgtgtctcattcatcgagttgtatgttgtatacctgctatctctatgcattctagtgtgaatgttttttttttgcggttgttcgccatctcagttcccttttctctgctcctaccacagcagactgcatctcaaatcatgacttgtctttccggttggttgttaaaacatgcagcttgcggctctccgagattttctgctcgattttaccatatttctgtttggatacctgattcaccgtggcgttctagtgttgtatctgtatttgtatagatttctcaaaggaatgattcaactgtgtggcagcttgttcagctcgacgtgttgtaactatgaaggtccattctattggcgaattctaagtcgaaccagccttgacattcacatatcataggtaaacagaaacattggtcgcacgcagcgccgatcataatcgatctatatctacatgtggaacatttgaccccggcgctattctgaggtaaatgtaaaaggaacaggggagccaagatattaagaaaaatacaccatacatccacggaaatggttcagtacttcttaggaggtactttcctctgcctcctgaggaatgtggctctcggtattagcatcctcctttccttcttcgccgtcctgctgggacgcaatatcttcgctcgtctgctctgtctcagtagccttctctgtctcatgggactgctctggggatgagacggcagagcgcggagcaggcgtttcaggctcgttcgcaacatcggggaagatctccaagaagagatcgggcaagaagcggccaaggcgtttgcgagtctcgacccatatttcctccttgcttgggtcttgggatggggacacaaggtagcctccatcagccattactaggaggatattcttcaagctttcggggactgcttctgcctacgagattgagaaaaaagaatttgttagatgggagtggtcatggtatacttgggtcgtcgggtagaataatcgacttaccagactatcgccctgaccactgttcatcatgcgatcaaggatgtccaggatcctgagccagagagggagcatacccgtccggttggggagctgatcgaggaagcgcaggaagatcttgcagaccaatgttgcggcttggaatcgggtctcgctcataccaacagggtcggagtggtagacctccggcttcaaaagaagtaggacgagcgggaataggacttcatcgaagatgctagtccactcctggtcatcgcttgagatcagttcggcagatagaagagatcgctgcagcgtggaaatagcatggtgtcggatatcgcgacacgggttgatgcattgactggtcaaggactggaagataggcgaccagtaggcagcccaggctagaaatgcacctattagaaactcgttgcagtagacatgtcagaggatcgatcgttaccttcattctcctcaagatgagattgtttgataagagccgggactcgtccagtcagatgatagatcagaccgattgccttgatgccgcgagtcacaacttggttctcactacggaaggagaagtaagtatcaacaatggacagaggtgcatggtacccttaccttgacttggattgtttgacccccttattccgacgggcctgagcatcccggtgtcgttcctcgatagaacccacacgcccggcgctgacgaagtcattggccaggctgactacgaactcatagttgtcggctgtgataatatcgggcattgactcaacaatgctttgtagaagatcaaagacaagagaagcgactgcctcgtgttgatggagtctttgcaagatcgaccagaaatccggagaaatagtgatctcgtttcttagacggcctgtatgagcaatgcacctggcaagacccttgaccgtcgccacggccacggtttccaaaatatcctggtcgaatccagaaatagcgtggagcacaacgggtacccggataaagtgttggtcctagcgtgggatcagtaaaggagaacctacatcaaagccacagggtaaaggagagtacatacatggctcagccgcaagagatttaggaggtaagaaacaacacgagacacggttagcggatggagattcttcgcatcgcgcaccagtgtttgaagagttgttgccaggttttcaccgagaacctccagggtcttttcgtcacgaagagtgagcaccgtcgccaactctagaacgaatatcatcgaaggatcgtatttaggttggttagggtcagctctgctgttggcaaccctcgacgttggtgtcgggcgttcgggttttacgacaatgactgctggtgcgttctcctcgggaagcaacgacagcaaagcctccacgagcatttccaatgaggacagaggaagagatctgcggaagaagtcagtatcatgaccacaacccatcaatgaaacatctttactgacttaatatttgtcaaaatttcggatattgagcaggcagtcacacaatccactgtgcagagtgtgttgtcaagttcttcgtccgaaggctcaggaggatcgtctgccgcataacttgagaggtaagatgtgaatgcagacaaaattcccgtgtcgttgttgcgtccatcccgatcaatcacctgtgatggaggctgtagcggaattggagatatttcaagttcggacgtgagtttagcgtcaaacggcgggatgagagagttgatgaacaagttactcaatatgcggacgatatactcccagccttggttgacagttgactcatttgttgagaggactcggaaaagcaccacagttgccagttgtgctctgaagtctcggccaaatttgacggctagctcgcttaccatcacactcttctgaccaacctgaacctctgtgttgagcgctgtactaggaggtttgctagtacccaaagtgctaatcgatgcaagggagaagacgatacggtcgaacgcctccgtcaagccatagcgggcagcaatctgggcacactggtcgaaaccattgaccacgcgggaatatactgcatcatctgatgcagacatgaagacatatgagagggtcgcaatcactggtttccacgtagccgcgaacatttcggcatcatacatgttggtctctcccactatgacgtcgccggcagatgaagacttcagcaatagttccttccaagcatagtcaaatgcatgcttgttttcgtgttcatcgggtagaatgatttcgttattcttgatagagtcatagatatcctcgaggaattcctccgcgaagtctccacccccgttgacgcctcgcaagttccttgcaaagccagcgcaagtcatacggttttgtgacttcacgttgcggttgtagagatcggtgttcagcatgatgatggcgtaggtcaaaatgtatagtgcgtctttatcggcgatgccatccggcttgaccttttcaatgtaatgttccgaaaagatcgtcacaattcgctcaatgagcggcgattcaccaggcaaacggaatgaactgagtagttcccgaagagcttccactgcactacgtccctcgaagtcaaggagatccacaaatgcgcctagcaactcctcgttgccgcgtttggagatgtattctccgaggactttctttgacaggcgtgtggtgcccttcaagaagcgagcaaccagaacgggattattcgcgtcctcaataacaccatggctcacaaggaaggcaattcccttcttaggatcctcattgaacatctgtgcccccttgataatgagtttcttcgtgtggcgttgttttttcaagctttcttgaggaggataatctccttgtataggctcgttatccagccgatcatggatgaactgcacatagcccaaaagggaatcgagacataacgggggtacatttgtagtgctccaagttgcagagtctgggaaagcattgcgagagagcaatccaatcatatcctcgcacaggtcggctcggtccacgtcacaatcatagttgacaaaaagctcaaccataaagctaggtatgcgtgacaacatgccaatgctctctaccattgcctctcgagcttcgggccttcttgatcctccttcgagccccaatctctgtcgatctctaacaggaacaggtgtggctcgtccgctattgggctgcgaagctggctgcttcaccaactttggtgattcaggaattccttcgtagagcgatgggtcgatgccaggttctcgcggtatttccacgcgagggtgcaagcaggccactaaatatgaaagatagagttcctgctgtaatttcaaaactggccggcaggttgataacaaggtgccagctactctcaacgaaccagttagaatagctatgtgttctgacctgactagctgaaagaggtatcgacaaagatcgtccttagccagggcagccagactgggatgccgagcaatggaaggacctgctacttccaaggcaacatcaataattcggagtgccatcacacgcatggcgtctgtatgttgccggttatgagggtccaacaggtcgatcaagacacggaataattctttgatggatggtaaggagtagggctgaagctcggtttcgggatcatcatgcgggctaggtggtgcagtagctgctgcgataccatttcctgcctgctcgggtgatccctctcgactagtactatgacgttctgcggccgatgtgtctgcgctgatggctgacaggtgctgcgaagtcacggtgtctccattaaccgacgggtccatcttcagacgagagggtgggtccttttttgtatcttcgcccgcaaatggatccggtcctgcgggcactccttgatcaagatgcgatagacgcatgaagatcacctggcacattttgaccattgccatttcggcggatctccgtagtacctctgacagacgaccctggcagcacatgctcaaaccagtttccatcatctcacagacgctctcgtcgcccaaaagctcgccttcaggtcgtgaaagtatgccctccatcaacttcagaatcctcaaaaggactatctcgtccgccgacgagtcgctggcctcaaatcggcagtgtgtgatcgcggctgatagtagctgcatagctacagagagccgtggggaattcgggttgataatattgtacgagaggaacttggtaatggagaccaaggcgatagaggtaattgcggcggaggtcgaagaggagcgaacgacctgtaggaatggatgaagtaacgctggggtatcaaaagttcggatatctttgcaatctttcagatcactccgcagtcgtgtaaaggccgatattaatgggttgtcctgcatgctcttccccttcttccctcgcagaccccaccgattagccaggacatgatcttcatcgggacgaggtgacggttgaccagtcctgcgtggaattggacttgagggggcagagttatcccgctcataaacacgagaggctccattgccgcccaggatggcggagactgaggagtgagcccagcgtgcatgcttgcgcatagacgaggtgacggtgatacattcagtggtcaccaaagccaccgggtctatggcaattggaagagaagacgagtccatagtgggatcgagcatcacaaaagatgctcgctgttgtgacaccattttgaaggtcgaacgaaacagctggtctcttgatcatcatactgctgcttgccttatcgagcttagcgtcttccccgcccactcaccgcctacgacaggggctgtactgcacattaccacacaatctgtattaaactgattggactggatgaaaatctgcaccgatgcggtatcaatgtaccatctggtattagactgcatccatggatccaaaatgtttgatttcacctttgttgacatccttctatgccaattcaacactacatgccattatagtcagataatcgcagtataaaacgtgcaaatacgaggtaaaaagccaatcagaagcttcacctacatcatgtatgcatgaaatcatcaacatattaaaccggcgatcatcgatatagtggctgatatatttcccgagtaaacaaagatgagattttcgaattgactacggacattcttcatgaaacgagcgtattaaactgtctagaagataatggcattgtccctcagaccgaattagtattcccgtctattcttgtcctaaaatctaagcttatatacaaggatctgaaagcgtgaagaataaacaaggtgcgaagaaccccatatattcagcgaattatgcagatgtgacctgtcacactgatccttgcagcggttggggatcgcaacgatagcaacggtgttgatagcgttggccggacaaacatagtagagtaaacattaaaaacaagagtgcgggacaggtcgaagtagagaatgtaattcctacaacctaggacatcgggctaagctgggtatccatattcaagtcattcttttattcttttactattcttagcgtcaggcgctaatacccactcttggtctatcgggctatcgcgatatcaacccaccgcttctctgtccccgcgtctcaaaacaaacgcctcctctcgatcttacacttcatttacttaccttctggagattttcattcggatttacgccactgcacgtgcctactccctgaatctatgaattgagtggatatctttggtacctcagcttctatggaggggagcgcgaatgtcgcaatcgctttaccaacaacaggataacacatcctacatgcgattttcaactgtctctcactgctcagcataggaaattttctctcatttaattctaaacattacgatcttgtctttcccgtcactcgttatcttgctactccaacgttccttctgcgacaaaccccggcgcatttcatttgtttatcgcacacggtagcgcttgcccaacatcttctcgcattctgcacttgcattgcaagtgcaccaccattcgctatggcgactatcgcacctccctccggaatctgtacactggcggaccttcctctcgaacatctcagcctctatcacgtcgccgacccatgtttatcatccatcttcgtcttctatggcgccgtctctaccgccaatgctactgtgagcagttcccgtattcaggcccatatattcacacccgccgggtttcaaagttaccctcggattacggtgtccccggctgcccccgtgtatgctgcggtcaaccacctaccccgcgaaaaacaaggtgatgaggtgtgtcgtggacttgcagtcagcatgctgagatattttgccgagctgtcggagccggtgaagcaccgtctgactggggtggctcgcactggaagaccgggaggaaaggtccccaagatgtttgatgagatgcatgctgcagatcttgccaaccgtatgacaaaggtggatgattctttggagattattcaggatattcggagcgcatatcaggaacgcaaggtaccatgggtcgacattgatgtggtgcttcctacgggtactatacaaccattccaacggcgagagagtatgggatcagatcttgagggaggtcagaatccgcagtatggtccatacacacccctgatagaggcgttgggagatcctatgtttttgccaacagctcgattgaagcgtgcgccgtcccagccgaccaatgtcagcaaatcacggctgttcgcaagaagccagaaagaagctcttcgtcttaccatgtgtgagcttgtggataccgaagagagatatgtcgccaaactttattctcttgtgcatgaagtggccgacgagtttcggcaaaaggccgtgggcagaggaccatccagcaacagccccgacgaggcagctttggcggcattattcccaccatgtttgaatgaaattctggaagtcaacctgggctttctcgatgtcattcgtcatgtgcttgatgaaacagagaaagatgccatcacagatattggtcaggacacggagctgccttctaatcgtcggggtttgccaagagatagatcggatccgcttggaattctggcattcgcaaaggccctctttgaatggctaccacaattttcacagccatatggagactacatgcgagcacatacaggcttcacgcaaactctgaattcgttcatgaaagataagaattctagcttttccaagagagtatacgaaacgggagagcagagactgcgctctctgttgatggaacccgtccagcgactacctcgatacagtctgctgattgacaccatgactagcaatctgcccttggtccatcctgccgtgcgaactctgctaaaagcacgagacattgtgaaggatatatgtgcgctagagaataattccccatcgagccacacccaaagccttcaacgcctccaagagctagtcaacggatggccagcgaaaacattccctgaaggtcggctgattactgcagtcgatttcaacgaaattacccagccgtaccgtctagacacacagtcatctggcagaagcagcacagggatcatgcttctttataagaactgcctagtccttctagagaaacccgccgaaagccggactacggcacgtggtctgctggctgatatcgacaatgcggccgcttcaaccaatgacatgtccatgtctttgccacaatcagaactccaggttgtgcaggtgctagactttcataacgtgcgttgtatgcaatccacgtgtggtcgaattttgttcgccgtgccaatttcagccaagtcctcaaaagaagagacaagctctgacctgcttgcattggaactggctggaacgtatgaaggaagagccaatcgactgatcgaagaaatatccaaggcgaagattgagggtcgattccccgagagtgaaagagaaggaggtaaatggacgctaagaagccctcccaccgggtctgcgagtaacgtgggaatactcgcctgtgtgtgcgaggacggtgaaagtgccgcgctcgaccagattcaggcatccccaatacgcattgtttttgatacatccaaggcgacctgcggtcaaatgttgagaggttccaaccttgaggtcatcatatcaatatctcctccaaatggagatcaatacagactagatatcgattctgtggttggatctgggtctacagatttgatcacggtggacacatttatttccactctttcgcgacgtcgtaagtgaccctcccttgagaattatatttcttgccactgacataagaaacaaagttcaatatttgctctcgcctctgcatagcgcccgaaacccagcattgacgaactcattggttcattctaattttgaaattcttcggtacatcgcgagcagcttaatcacgcaggtcaagtcttcacggggcttccggccaccttcgccgaccaaactaatctcaaacctgttggggggtagccgtgataatgtgcccactctcaaggggccagggtcggccactcttaccggcgaattcccaaaaatgcctccgccaagagtgaatctgtcgagatcgaacactctaccttcggcattcccaggaaaagacaaggacaaggacaaggaaaaggagaaagagaaagaggaaaccgggaacaggatatctgtcgttgggacatctgcctccaagggattggatactcagttcgggttgctggagcagacatttgcagcctatgtgctttctctgcagtctcggagtggaaacattctgggtcgaatgcttcgggtcagagatcacgttgaccgggcgccggtcaatgagctctacaatattttgctagaagacccgagcagaattcaggctgccgccgaagtgccagttgatacgctttttgtcgctttcgaaacttttttggcgaatgcttggagaacaagtatgggccccgtcttgagctcctcttctctgaaatggattcagagccagtttgacaccatgataccgcgggattttgatgagcaatttcggaaatttgtgacagacatgagcccgcaaaatagacgagctctggctgcgattattcgactacttgccgagctactcgatgcatctggaaatgacggagatcgcggtgctttgacgatggcatttgcggaggtactcaccgaagacggagatcctagccatcatgtctcccttttggaccgactggtcgaagactttgacaacctctttgaagaatttattcctgggggtacctcagtggaaggaacactgacctgcgatcaatcgaaatcacatgccaataccgggtcagtcggttccaattcttcctctttccggaaacgcttcggcttcggtatgtctagagatactccgaaaaatgaaggcgaaagcaaagtcgcagcaattctacggacattaagcaagaagcaaagcccagccggctcagagctcaatacgcccaagggttctttgatgcgctcaaagtcgactgatgtggactctcgtctgggcttccttcgccctacatctcgcgatcgtcctacatcccgtgatcgccctacatctcgtgatcgccctatctctcgcggtagccctgcttctcgcgatcggcctttatcccgtgaccttccgtatcgtccgtacgggtttgcatctgaggagcaaatctcgaggccaggcactgggtacgacaacccgccctctctatcttctttccgaggattctctgaggatagcgtacgaagaactcgcaaaaaacgaaggagctccctttcggatatacgaccactcacatcatcctcagatgcatccagtatctctccaactcaacagctccgcccgacgaccccttccagtcgccctcaaggagaagtggtaacgcccaccaaccagtccaggcctcagagcagttacataccaacaccacctatgcgtggtcagtcaccaatgcgttctaggccgccagcaaaatccgggtcaccgacgcgactaggatcacccattcgccgtctgtctccgccccgcccttcgacgccgagcaggaaggagaacattgatcccagggctccacagatggagcgtgcatttaagtccaggggcagtgtatcagaatcgccagccgatgagtcaaggaggagatcccaaacgtcaggcatcccccagcggattccgggccttcgggagcggccaagcagcaacgcttccgataccaaacgaccacaatcctcgtctggcttgcaaaaaccacagaaaccgcggatgcaaagcccacaaaaggttagtcacattctatttctttcgataatgagttgactgacatcccttagttacgcgatcgtgttcaactagaaaagagaacccaaaactctacccaattgggcctgaaagacgagctcacggagcttggtaacgaattacgttctctgaagctcacaccaccaaggaaacccaacgcaatgaacttggagtttgattttgaccgtacagacatcaatccacatgctgctaccgccgcatcccttgaagctcgcatgcgcaatcttgaagcccgatttgagacagttactggggaatacaagtgccgcacgtccgctctcgagcgagacctggagtcgtccttggttcttagcgagaagcgtgttaagaaattggacgagctttatcgtgaggcaagcgccgagaacgaggctctctatgatcggtttaataccgagctcagcaagattgcgaaggatgtccgattgggccacgcagaagacgcgttgaagtctcaactggcaagtgccctagacgagatcggccgagtgaagaaagaaaacttccgcttgaaacgagaagtcggaggtcttcgagcccagtcagctgccgctgcactgctgaaggcgagcgagcaatgaccaaatatacagcatcgagggcttgtcccaccatcattcctttcccatattccatacatggttactcaacaacctgacacctgtcacattatctttcctttcaccttgtaacttgataccgcacaaccctcttctactttccttggaacgcctattcatttgcatacatatcatgagcctttcttacttgtattcattcctatttcttgtcacccttcatactggcctatccgcacagatagccatttgaccatgcatgcatagctcaggagatcaagtttttacaaggcttgctttttgtgtgtctaagtgttgttgtcatgtacactaagcctcttcggcatctttacccaccggccagcccatcagacatagtgcctcagtgtcaatcattttgtacatccactgccatttcagtttccagcgacagcgtagatgtaccacttccacctcgttgagagaagaatgcttagctgaatgaccggatagtcgatagtccaaagtcggcaatgccagtttttgccaaaccttctgacttggaggctttcctggcttagacacgatgccttcccttgataacacaggtaaagtaaagcgcaactgagcaggcgcttcagcagacaagagagccttgacgtgctcaaaagtcccgggcatttcctgtccggcagtaaaatccttatttgtttgccctcgcggcctcaaattagccgcatctttgcgtatccgttcgatatcaattttattgaacgggcgtatcgtaacaggaagacttatcagttcatctgctagttcgttgggatcacggtcgaccggaacgagacgaagccgcatccagtaccggttatcccacaaaacccacggagtaaaactgccactaggcgaaacgttgacttgggtcacggggtcacgatttttcatgaatggttgtcgggatagcaaccagatattatcacccccgagccgtggatcgtgggactttccaagtctggaggcttcatttgggagacgctggaacagaacccccgctaccgtgaagccttttcttcgtttctcgtcattggacgtggcgcttgcgccatgagagccatctagaccggggaacacattgtgaactagtggctcatatctgcgtagcgagaaatggctatcggggaagggagagactagttctgtcatgcggcggagaacgatggtctggatctgccggattcgggaggctgataatgttgcgagttgcgggtccatggatgctggggttttgtctaggaattgaatgaccgctgaccctgccttggggttgaaatctagcatccggcattgagatgagaggaggtagttggacagctcgtttgacctctgaaggaggtcttggcttgaccgaagtagggagaggatggattgtgattccagcgcacggggtagggagtttgaggtgcgaagactgcggatggcgttccggggagtgagggttgggtcgaaatttgttgggtcggagacgtaagggacttgatttttgtggcaggtctccagaagacttgttttggcgaaggagagtagaggtcggcagacgaatatgcccgggcttgccatttttacattggatatgagattggtgtgagtgttacctgttctagcggttgggtcgggagaagtgatgtgaccatgtgtctggttatagaatcggactttggcttgtggttttgtcggtcgttttatggggattgatgtagtcgaccagctttcagaagcaccgaagataccatggcattcggggattcgagcaacttcaggaatgccaccaagacctaagccagttgctccagccgagagccgcaaaatggtggtttcaatgttgtcatcttgatgatggcctaagagcaatgtttcgagttcgaactcataacaagctatgccaagggcttggaaacggagacgtcgtgcatgtgtctcaaaggcggatggcagaggccccgatgctccaggctttggcgacaattgattctgacttgagataatttcagaccagtctaaattaaggatatgtgttctgatgtctgttcaataatggttaaacaatcttctaagatgcaaacattccgacttggaacatacccatatcacgaagccagccagcaaccttttgtgcctccatagtgctttccggacgggaacgatgatctaccacaaaagcagtgacagaaatagctccagcaacatcataagattgctccagttgcttgcataggtatgctagagccatagagtcggcgccaccactgacagcgattcctaccatcccgcgcatcagctataagatcttgagacacaaacagcgagtctatatttttcaatatttaaagcttaccaaacttccgtggaagctgtagagtgtcattatcaccgggattctttccatacttggcgctgccataattgaggcgagcgcgtcgcgatctggaccacgcttgctggaaacaacgctggaacaaaaccggcgatattgatatattgccggccatgtctattctccattggaatcaaacatgggctcgaaaattcaatatcatcgtcgacctatagattcacttcacgcggaggagagagaaccttagggtgatctcgtcggctcggccaatcaatttttccgagaacgtgaccagacggcctttacacgaatacgtctccgagattttatcagttagtattttaaatagtgacaagtcatttttgagatgtttgggggaaatatgtcgggtttctgatgctgacagtggcgtaagtggtggttactgagttccatatgttgctcgcatctaacaatacgagatttagccggcccatgtccttttgtatagatatgttcgacggcggaaaaggggaggaaaagcctgaaatgtgcaaatgacgtttcaatatataaccttgtaagtgcgtgatcccgagatctcatacatcttcgactacagctcgacctcgaattcaccatctagaactagtcatggctaaagttgaatcctaacccctgagttgtagtgtaatccagggaactgggcaggcttaaacctgagttattacatgtagcagattacatatatagcaatcaaccgctagggtaacctctcgagatgatcataacaacaatcggaaccttcgataatccctgcagcggtatatatacgatgccctaacaacgttgactacagcgacttcaccacggcacgtgatatatatataccctgatcggacaaggacgggcttgttttgatgagaatctaccattctatctgttcctttaactatcgcttcgagggaagatcaataggagaagattacctctagttcgacgtttgatctttggaccaacgatccaggaactagtcattggcagacgccatccgattgatcaatcttaaccctggaagaatacatacattgataatgaattggaaatataagttagaaaaacaatttacatatatcaatttatttgcaacaactcttcccaatagtgggcgcttgtgaggtatctagacgacagaaacaggaagaggttacaggtacatcagccacagcaacggctatctccaactgcggcccaataatgcgtgcctcatcattccgacccagacgtatcaaacattcatggtagccctgcaaagcccatacgttattcggatgctgacgagcacgaataagagtgccatcaagacccaggtcagcctggtagacagccgctgcatcctcgacatggccctgctctagcaaaagagcagcgtatgcatggcgggtgggctgcatccagctccagggctcactgtagcccagcccatcgtccaattcaatcgagcgacgtagatgctcgaaggcctccgtgtagttcccacggcggtactcgatctcgccgtccagcatttctgacgccacccctaggatatcgatacacttgttgggccagtccaagcgcgtatccggcactcgatctcgcgctgcccggtacagctctcgctgacgctctgcatccggcacgttccctgttgctgcatatgccacgcccttggcgtagtgcagaaccgctatcgtcatgcagtacagctctggatctgaggggatggcaatcttgataatctcgtcccacatgccgaaccgtatcatgatgtgcgcgcgcacagacatgaagatttcgatgtagtcggccatggccgagagcaattctttcggtaatgtcgcctccatgcggtccactgcggcaaatgcggcctgtttctggcccgcaaacatggccgcgtagatgagggagtggtaggtgtgcatgcggtagacggagtagaaattaaatgggcctttcagcgccaggtatttctcgtctgcaatcgcggcacgttggtttgcgcggacggcgcttcgatagtctcccaccagcacgtccagatgggacggcatatgattgatatgacccgcgtccggaaccagatcgcggaggtagtcggccggtcgcaggcctagttctggaaagggcgacatctcaataaggtgtatgtagatgtgcaggagaccggggtgtttggaggcgtccttatgtttgagagcggtctctagcaccttttttgcttccatggtacgggtgcccggatttggttttccggtcaccatgtcccacaacttccagggcgtgaggctgatcaaggaatcagcgtacaaagcgaccacgtccaaatcatcgctaaacttttcatatgcctctttcattgcatcggcatatgcaatattctgaatggcatattgatccatgctcgcaggcttatcactctgatagcgggcggagatggccttggcgagggcctgttccacggcgttcccattttttacagacaggaagcgagctttggttgcggctcgatatgtgttttccacgacggccgccaaatcgttgccgaggaagtcccagggctggttgtagttgggaccgagagagtaggccaacccccagtaggccatcacacataatggatcatgcaccaatgcctgtttgaaacagacgatggattccttatggttgaaggaatatgcccacacgagaccgcggtcaaaccatatttgggcctcaggactggtggtggtgatgaccttcccgtatgcccccagattatacggatattcgacctgggttgatccttttgtcatgttgctgatatatgccctggtgacaccgtatgatgttggcgggaaggtgaaggagagaatcttgacgagttcgggtttaggcggggttcccgctacttgtacccaacgacttcggacttgttccaatttattttatgttttatgttttatgtgatgctgtgaatctaatgaactattgaactattgtgaactatgcggtctatactgcatcttattggattcccagtcggaatgcaaatgcgattaggttgtactagattgtactattgttagtagatcaccatgtacagccattagaccacgagatatgattgcttttttctcttctttttattgattgattgatctctttgatctgaacagaaacaagagacgtgaaaactatatgcaaatcaagaatgtatggcagttcagcctcaatgttctgcaattcctattttccccgtcgcatcagcccacactttgatatatccccatttttttttcttcatcacatgttgcaccccaattaggaaagacgtctttttaatagaaagggagttcgtacttttgaaaccacctgctaagcctgtcacttggcttatttttgcagggatctctggccaaggcgtgaatacagggttagacacaatggcacatggttcggacgattccaggtatatatcgccacatcagagtagagaccccttatattaactacaaattaagttatgcacctcctcattgacatggcaaacgttagtcagcgcgctagcagtgacgtgggcccaataacacctcggcaggtgacattgctgagaaatcaaaggtggcagtcccaattttgggtataggctagaccgaactataagaaaaagcaaaataccattagctgacttgttgtcttgaagccgcaacaatgctagtggaaggatctccaagcctattttttgtcaaccaataagaacgaagttgtacattgccatcacagtgatctgcgaggtatatagaaaataggccaaataagccggctaaatgtgagatatcggcataataaagatgtgcattcctatttgagacatcttgcagatccgagccaatcctctgtcgtgcactctaggcagacgcttatcttgggtgtctttgatactcccgactactccgtatactttccccagacctttaaccttcctcttccctaccctcgaccgagaattcctgcctccaacaaccagacaccggactgcaacccccacgctcccccgtggaagagcccaaataccgaactacaacctaatcgcccgacatggcactgtcactgtcagcttcacttaaaacatccctactaaactgcggaaccttgatcagtgaaagactcgaagcagctccattccagaccttcctactcttggcatctgtgtggatactctctatcccgactcttgtgtttttgatgacccgctactggccctcgtttaactccaaaaaggccaaacctgaactgcgacgctcgcgcgagaacaccgatgccagtgagacccctgcggggacccctattcaaaccccgagtgagaataaggattgagtcatggggcgcaaaacgccacatgtaactacggggctaggtgggagcaacaccagttcgtcgatcgctctgtatcagccctgaactcggtagtctattttggatttcctggtgaatgggaattgttattggttgctctcatgcaagttcagtctaggttgttcccttcttctaagctaaactcatttaagaacaccttgcatgccgaaggcgggatttgccgtccacattatgcgggggatctacgggagtatatacaacaccggtctctgctttatatactttatattgttattccccgctttgacgatatcatgtcacgaatctttctgctatactctgtaccttaatcagaaataggaaaatgcagtataccaagtggctgtccgcagtcagaagaccttcattgccgggctttcattccctagaactggtatagtatcctccgtaagcttacccgatctacctgcctcattcagtgttatactccaacaggactcggccgagtcgaatacacaaaggaaaagcagccttcctcagcgcctctcaactagtgctggtccagtagtccaatcctacaaaggcaaccgtctcattagcacgagataggagtataccaagtaaaccccaacggtgccatgtctctcctccatgtgtgaatgtaacccaatgcacgcccagtttggagtaaacccgtcagcagaagacaccctccgcatgggattgcctcttcggtcaaggcattctcctcgacgaagtacttccttttgacagctcgagcagaatcccagatctataagaaccccgagaaagaacggagcaaagagagcctcctacccgaccataccaagcaatcatcagaatcatccaacagaaaccaaacacttctccagaatcttcttcaagatgctctccagcaccatcatcaccagccttatcctgggtctttcccagctaagcactggcattgcactgccctcaaccccacccccaaccccagaacccggcttcatcatcaaccacgtagcctccgactacttcccaaactcgaagggcgacctgagcgccttcgacgtggacgtccactacgtgggatattccagcgcgaccgaagcctggctcaccagcctggacccgcactcagccaccagcgacgaagagaaagcgcgcatcctgaccgaagccgcgtacgcgaagaaatacgacgagaacgacgccgacatggccggcgacgtggagtcgttgctcgcgcacgttgccgggaacgtcaccactactaccgcgggcattgcgaagcggtcgaccttctcgactagcgcggcgcatgctgtcctgtggagtgcgtgcggtacggtgttctcttgtattgctggtacgacttgtcagtttgatctgcagattaacagggccccgcgtagccgttgcgaggcgcagggtggctcgaactgctgtgttagttggtcgacttataatgtgcgggctgggttcttctcgagtacttggacggcttgcaatcaggaggttcaggccgagcataagattaatgcttcttgtgagggattcgggacttcggaccagggtggtgatgtttgtctaagcaatcgtgctactggatgtacctaagttgttgaggatgggaagttggggcagaggtggaggatgcagaggcgggggatgcagaggtggaggtggagaaagtggtgttgctataaggaacagggtgatggttgttcaagcttaggatcatgattatccatatgtagtcatggaatgcaattgttgccctttttcgagagccgtcaggatcatatctgatatgatcgttgcatcggggaaatgtgtaactacatagttagtaccccaagctctcttgggtgtccggttagtgcagctagtcaggggccattaacggagtttacaacagaataggctttgaaggatccattgattcgattcttcgccaatattgccgggaacaccggcaacattaatacatgagaatgcaagctgcaagattgaggcaaaagcaaggcccaaagctacagccaagtaagccagatgcgctaacacccagaagaagagaaacaggagatgtgatagacatcaaaaaaatcaagatcaaaatcgaaatcaaataactcgcccatatgtactacaaacccatgcatgtagcattcattgcattggggtaggctgaatatcaaatgtaaaatttgaagagaaggaaaaagaaaaaaaagaaaaaagaagccaacgaaaggtcccaaagactaggttttcattaggtgatagcagagcctgcgacagaggccgagttggtcacagaatggatactcccgggtggtgcatgtgcgtggctatccccgttcggaatgtgggtttcttccacaaggacatggttctcatcaattcccaggagagaccggggcgggtgaatctctttcttgccatttgtcttgtagtagagaaccatgtctccggaggtgcgccagaggtgcgtgcgaatcgttgctagagtcatgtttggtggacacagctggtggatgaagattagcatgattggcgacaataaaatataggagaaaagcttacagtcttctggcagtatagctcgagatactcctctggtggcataacggactccggttcatccgggttagcagggtcgatgcgctctgcgacataagcaagaaccttctttgctcggagcatgcggttggcattaagacgagagccattgttattagtgttcatatttcccggaggggcaccattgggagctggcctggatgaataacgagattagtttcatcaacaacacgcattccagaagatccaaaacatacgggtcgggtttgacgactggcggcaaggtatcatcgaaaggcttcaatacgaaggcgatcttgacctgctccttgaagggaatttgattctataacgaatgatcagtaagagaggaaagaaaatgcgagaaaatagacgtaccttcagaagaagctcaccgagccaatgaggaattgatttcttaaggctttcgaggtcttcaccaacgcggcccacggtacctctgtagagatccgaggcaacggcagtatcgccagtttcctcctggatgaagactgcagtccgggctgggatatccagtcgcggagtttcctcctcagaactaggagaaagagccgtctccaactctcgatctgtatttgtagccagaaattcttcataatcgtcacgaatgcggtcaacgacgccacagagattgggctcatagaccttctcttccttgatagaggagatctccgactcttcgaccttttcttctaatatctgaggcttcgtctccgtagaattgcgacccaacttcttggggaagttcatttggaacttttttccgaatagtgacttcttccgctcttccttatcaggctctgcgggggattgaggaactcctggagttgcatccgacggagacagaagagacttgccggtgtcggtttgttgggccgctagaggccttttcgagaagtagtcacttggtgaaaaggatgatgccccgccatcgacatgggaatttgttagccccgaggcatcaggtgtgtctggttcaaatgcggggaacggagagttgctctgcatggaagtgctcatgtagtttgacgatggtgtgccaacattgatgccaaagccgatgttcgggctaccagggaagtctgagctgggacgcagagtcgacatatgatgaggattcgatatcggaatcccaatgctgcgagggacatcatcgccagatatcgaggtagtcagcggattcagtcgagcattttcttctgctctcgcgatggcagtttggcggtaatcgttgtctcgtcggacttcctcgtctactaccagagcgaacagccagcgcaaaatccatttgccgagattgactgcgtgttgtcagtatggcaaagaatatccgccaaggttgacagtagagcagaataaatagtcgtaggaaatactcacttctttgatcatccctaaattgatacagctcagatagtggtagatcgatctcgtcggcataaacttctgcgtcgaaacagcgattgggctctagaatgactgagagcctgccagtgcgtacgttgatggcacaccaatgtccgatactatcaacggtgtttacctctgactcaacatcatccatatgacgcttgccgaaggtttggacaggaatacactagattcatgttagtcgatgtcttatacttctccggctgagatgctaaatcaccttcagcaggtcccagagaacaacttctcctgccgaatcctgagtaagtgtgcgcctccgatcattcaacatcaagcacttgatcaagccgtgttggccttcaatggtttcctcgggctgtgaatgaaccggaattgtcaggtcaattgtcgccaagttaggctccgaggaattaagtttaggggctgcgccaccaagaatcgaggtcgctgataactgcaaaagagcattatatggaaccttcttcggtcccttctctggggttgcgggctttgcagcagagtctatagtacgtgctgggtcgggggccggctcgatccccactgtgatgtcaacatctcgccagcggttgatactagacttgggggtagctgtccagatgtagtctcccgccgccacaaccttgacaacgccctcgtgctcttgtagtgcggcgacgcagaggccctggtcgggatcggccgatcctcgcatgtcggtcttcgccaccaagccggaacggtcactcgagtagaagacagagagatcggggtggtccgagtaaagagaccacacgctatcattgtgcatggtcagggtgttcatgcatcgacccgctgtgagagaccagatcttgatcgtctggtcagacgaccccgtcataattgtgtcgccggactggttaatcataatagcacgaatgttgtccgtatggcccacgaacttcgtcacaagctttccagaccggggatcccatactcggacgacattctcagggccaccgctagcgagcaccgacgagaccgcacccagcgcatagacagagcctttacccgaggagtcttccccgccggcattgatgttcaatatctccccgccgccattcaaatcccagaggtaaaccttttgatcgagaccgcccgaggcaacccaagtagcctggctaccggggctcgctagggccttcacataatcggtatgctttccaatgcgctccgggacctcagttgactcggagtgcgggcgccagagtcgcacggtcgtgtcggacgaggccgaaacaagcgcggaattgtcctgtgccaagactatgtcgttgatccaatgactatgtgcttggacctgggttttgaagacggtcggacggggcttctggccaggagacgagagcgcagacgcagaggaaagaggaaagtcgagatcccaggaacagatgacaccgtcgcggcccgcggagtagctaggagaggggacgtcatattagtatccgtgcaatccacgtgtaaagaagcctgatttccggaagatcgcgatcgcaaacttggcacgggttcaaaactagatcatggatcccagcactagcataacgggggaaagatacttacaggatggagttctgacggtcgaccgtcaagccattgacccccaaccggtgcccaccgggtgcatcaggcagagggaggactagagtgagagacacagtcagcgacgtgggggtggatacacaggatccaacataccgtaggtgaccctctggtggcttagtttgcgtgccatacatgcagcgttgaaggagtgaaaccaattgcggagatgcgaatgcggagcttatctgtcgaggccgatcgcacgttcagttttggtggggaaagtaaacgtcagagcattcgcgacgatcaaaagagagaaagtcaaaaggccaaggaaaaaagaagcgaaggggaaaacagtcaaatgaggggaagttcagagttggaggcgccaggggtccggagtttatgtgtttatgtgtttggccttcctatgtgatatccaatacgaccttcaagtagaaatcatgagattactcgtctttctccattatttaatagcccgggggcctttcctttccctttctggaatgcttctcggttattttaacgatttgactacatctataagttccatagtcttctatgataccagatatactttttaacaagatacacaatacataactatatattatgcacatccacaagactcctcgtttagaggaacaatccttcagccctaccaatggggtactgacttgcccgctccgaatggtttgacacccggagatcagatttgcgctcagtctagtcaattggatgctccactcgtctcgtatggaatgagacttaagctcgtgcagaacatacggatagagcagcttggctgcatcgccaagatagggcttggtttggggcttcgagaaggctgcagctcgtatagatttgcagaacatctcacaccctaaagctatacgcgtcattctccgtaattgcacgaatgctcatctgattccagaatttcagctatctataagccagtgcagtgggttgaagggtgtaagtatacacaatataaggcttcttttatgttaccgatgagcctgacttcttcgctgattagccaggaacgtctagtccatcttatagatgtgcatctttgattcacgagtcgccaagggcgttgccccaagccttgagcttgcaggccatgatttcctgcgcaaaagggagatggaagaactattagctgtcgagcaaatcccggaattgggctgcttcaagccgagagcagtccgagcaagtaagaagaatgacatataattgctcaaacaactcgcttcccagaatctacagaatctatgctcttccaaccttctatatagcaaaaatatacaaactacaaggccaagaaaaatccaatcaaagacttttctccgcctgtgccgcctggcgtccctcaagagtattcgaagcatattgatagctcccaaggaaaacagccccaccaataccaatccacgtcacacgcggcgtgataccacgccagaaagcaccgggcccttcacgtgcaatgccgcgcacaatctccttaacacgaacaggcgcgtcaacgccacgccgcgcaagcataacccgcgtcttgatcacgtctagcggggtagttaggccagccgcaatggcgccggcaacactgccgaacatggcgcttgtggtagcgggaatctgcgtctcggcgagagacgaggccgtctccgcggttcgcaggtaccgcttgccgtaagcttccttcattgactcccacattgtgaactgcagcacggtgaaggggatctcgcgggcgattgtgatgcccgcgccgcggtagagctcgcggaagacctggctgtagccgcgcttcggtgctggggccgagggcgctgtggttgtacttgttgggaccgcgtgccgcagggacaggatgtccttcagtgcaaggagactcgagccgccgaagaggccggcttgggcacgctgcttaatgacttctgttgggacgcggacggcgcatgcggcgatttcgccgagggaggaggcgagtgagtgtgtgaggattatgtgggagcgggattgggagttagttttgctgttggcagattgaggtacgagcagagtccgcttgacgctatcgtagacgatgaagaaggaggcggcggagggggcagagccaaagaggacagatgggaggccggcatagataccgcggaaggtttggcggagggagacacgggtttggggtgcggtgtggtcgcgtgctttttggagtcgggttttgatggtgtcgagagggtagagagagcagtcgacggttaagcctgcaatcgcgccggactatatagtagagctgttagagggatactcccggagagagctctggagaagcttacaattaatgaccgcgtccacagggaggagaccaatggctccccgtcaggttgggccatttttgaatagaattggatatgaagatggttctatcacaagaacatggccaattggttggaaaagtaggaagggagaacggcaacgacgtaggttgtacagcagcgtaaacggagaagctccgcggatatggctggcagtttcttttgctccgcggtcaggccatccgatatcgccgatcttcgctacgtccacttcaaaagaatttatactatcgtagggtcgacgtttggattgaaatgtatttactattgaagaaaataaagctctttcgcacaagcgtggggcattgacaaaagaatacccccaaaaaaacacgcactgagacatcccacaccaagtctatcagtaccatccatcgtcaagccagagccagtgctccgttttccctcaacatcttcacaagagaaactcgagcgcgataaaatgtcacagaattttattgaagaatatcaactcatctcaaccatggccgggggaatgagggaaaccgccaaatcatctacaatactcgtagggaatcacacactgaacgcggaagggaaggggacaaaagtgccaccccgttctcaaaggataaaggggatatatagacacgaggagaagttgatacaaagaagggatattatttggccctggcagctttgctggccacggcaggggtctgggcggggggctcgaggacgtgggtgtggccgggggcattgataatttcaccagtcacgtcctgtcggcaggcctgaatgttctttacccagtcatccgccaggacctcgtcgagagtcgctcggtttttcgggttggtcttcagcatgcggccaatgatgtaccggctttcccgcggcaagatccggagaagtcgccatgggcccttgatgacctcttggcgctgcccagaaggctgggttgatgtctgaaccggcggtgcctctttgctggtcgttcgggtgggccgatcatgggcgcagttgctggtttggctgatctgcttttgagcagtatcgggaggatcatcctccctctggagggggggttctaatttctttgcttctgcatcttcaggtccgtttccattttggtccgttccagactgatcaggtccgctcgagcgaggggtcaaacgcttattgtcctgggcttgggaaagaagatctggtgtcgacttgggccgacggcgtggctccggttcaggaaccggggtgcctggggtcgggctggaaacgaacagcttgtatgagttgtcggtcaggcgcggttgcttccatgggaaccggcgcaaggtcatacagcagaagatgatcgccagcgaccagacatccgtggggcgagggtcatatttcttctcgtcgtagacctcgggagcaaggtaaggatcagagccaacgatacctggtcatgcaaatcaataaccaccaacggcgaacaaaaaagatacaggattacttacctgaagcagggacaatgtcgttctcaaaaggatagcggaatacgacggcacttccgaaatcaataattttcatgatgccacggtcgttcaccaccacgttatccagtttcagatcccgatgggccagacccatgccatggatgtacgccacaccgctcagaatctgcttgaaagagcaggcgatctcctccttgcccattttgccggtcatcacgatggcaaacagatcgaacggcgcatattccatgacctcataccagcgactgccttcttgaatgatatccaaggtctcgatgatattgccatggtgcaaggtggagccaatacagaactctgcagtcaccttcttggagtattccttcaagctctcccagttgtgacggtctcggaattgcttgactgcaaaggtgacaccgtcactgttgcgcttcaagagacgcaccgagccaccagctccagatccgagcactctgcccagctttccatacttggaattcagaccgtgatcatcggcaaagggaacattttcggtagccatttgatacggagtggactttccagctgatggactcgactttttaggcatcgatgtcggggactcggatcgcttgttgcgatggcccatcttgaagaatcgtttcaattcagacatagagccatgatgctggtggccgtggtgcttatcgctaccgtgctccttcttacttccaaatatgctccgcttgtcactaggtttgctgagatcactcgcgctactggatcggggagccgagggacgaaatgaccgtttgacatcccgaccgctgaagataaagcgaggatccaactgggcaaggtttttggactggggtggtcgcttatggcgcgcatatggatcattaggttcgcccacaggggtcatagtcactggcggagtaagagactcctgtggagtcgaagggggactttcatcttggggggtgctcccgtcattcccgacgaagaattgcgcacgatttttgggtacttggatagcatgaggagctcgctctgagccttcactttttctggtaggctcggtggactgagggcgggaggatgagctgggttgaggcgtgctgttcttttcggttgatccgactggaggtgacgcttcaggggtgaaattagtgtccgcgtggggtcggctggtagctctcagagaagaactgtcgctggttcggccttcgcgagaatgggttgcagctggagtaagagggggtgactgtacagcagaggttggaggagacggacgcggcgaggcaaaggcaccggtgccatgtccactacgatcactcgactcgcgagatgcaacctatgaggatccaaggttagtatgatgacgatattgccacagtccattgagtctccactcagcggcgtcggattgtgggaagtgaatatcactttaagcttgaagggattggaagactcggaagaacacccgacaccaaaaaagagagatagatatggacataccctggaggaaggaagagacatggggtcaaaggagaagttccgcaggcgggactcctgaagctgtgcgccctgcatactcatcgccagcgaccgtaattgttcctcgtccgtaggtcgcctttggtctggctggtctggttgctctggttgctctgatacaggggacaaatctgatcgacctggttcaatctcctccgcgatggaggagaaacggacttggttaggctgagctcttgacttggcatcggcgtcaccgggttccgaggcctggccggggatcttcgcggggttgtgcatactttgggattctagagaggtagacgtgcgtcagacggttggcagggatatgggagacaccatcacaaccgatcaacacggcagccaagacatacctgaacccatggggttggtgggtgttggatcagtcatttcagacgtcatagtgttcgcagttcggcccggaacgtgggacacatgcccctcacggtgggtgagttggagaatcctagatagcgaactgaaaaccagttcaaaagctgtcaaatgtggtcaaatccgcagaattggacggtttcctcccaaacagagcctaaggagtcaaagaccgacgcaagaggcaaatcttttccctttttaacttttttttcttccgccgaatgcgatcgagagcacccgggtctggttcaggaatccgggaatccgggtatcccgggtctaaacgagaagatatgagaagcggagatggttgagggaagaggcaaaggaagtaaaagagaaagagaagaggggagatgtcagggtctgggcctcaggcaaacctgggattttgggggcgagtggggtgggagggagggaggaagacgacgaagaagagagatagtgagggagtggtagtttgtctgtctttgacctcatttactgcatttaatgccctttttttcgtttggcctatttccaatttaccagatgagcacgataatatgtcaaatataccccatatttacccaaactgtccttgaaatgccttacctcataagtcggatggccgcggagagttcaagatgatgtcgacccgtgccgacttcccggaggcgctgaccagacgctgaccaggccctacgtactcccaagccttgctacgacgtatggagtactcatgttgtacatcggtaccctctgcaggccactggacgatgggtctttggatctggaatattgcctgaacgggcttagtatatctgctgactccactagattccctttcctctccgacatcgtaaagggccaggccgtctttctccgctagattctccagactccatgccaagtagcatgtcgacattatgcagtgacacattcagggtctacgaagtcacacacatgccaagttctccgctccgcagatcagttggagtctgtgacctcatctgtaggcttccggtcacttctcttggttgtccagtcatcgccgagaagaggtccacgggaaaaccggggagggtcttagtaggcgtgtgatcacatgtcagcccatttcaattgcattgtggtgattagttggtctatatttgactttataagtcactcttgccgccgcttgcgtacggagtagtatatagctttcaatgtaaatatctcttggatttcaacagatatagacaatctggaaaaaaataataatcggtatcgtacaacgggggaagaagaaaccccaaatttcccagaaaacgcccggtaaaccgatccaaatcaaaacaagcaggccccctggagcactgtcggaatgaccaataattatacaagtctattgtccttgtgatgctcagggaacgacctggataccaatggacttggcctgggacatgacactcttgcacaatccctccagggacaagcctgataaccgcgtctcggtctgcttaagcttggcgatctcataaacgtgcttgagggagatcttgccacaaacatcgtggccaggattcatcgcaccacgcagccggttcttccggggttcgacattggccgcgttgagcaggaggtaagtggtggtcggggtgcgcagttcaaaggagaaggatcggtcggggcggaccgtgacacgcgcagggatcgggacaccggtgttgatgtgagctgtacgggcattgaattcctagagaagtagttaatatacatgaacggttcatataaaccgagtaaacaaagactaaccttgcaaaagtccatggacttgacacctttacttcccagagccggtccaacaggcggactgggactggcctgaccagctccaacgatgagcttcacaaactgatccttggacaatacgtttcgtgccatgatgagaagatgtcgagatggtttccaaaggccacaagcagagaagatcgaactcggaagatttgcagatttgcagattttcagccgacgacgctgattggccagagcgggaagcgagcacaagaaaccccaacgtcataaggtacactcctttctctcctcatcagaagcttctttggcttctaatcgattcatctaaccatcttcatctcgacattcacgatatctagattcaatctctattctcatccgttggatcgaatatctggtgtatctttctcatccggagagtcccattgacatccgaactagaactctcgggccccgcgcgtcgatcttcccttcacctcccttttccttcttctttcttctccagtttttattaattccaaacttatcgaaataatgaactggttaaagtcgacgtacgttccgatcgactcttctctgttgtggttacactgaccgattccatgcggacagtctctccgccgtggtgggcactgaggagcctatctatggcccagaggctatccagtctgttgcgaagcagggcgagaccactcccttctccgatgtgaacaaggagattctgcgctggcgcgcacactcttataccaatgtcgaaacccagaccttttacatcatggccgacaacgggacagtggttttccttcaggttatctacagcaacattgtgtaaggaacactcagccggagcttgaagcttccaccatgaaatgaagacctacagcggctgactctaatccttgatcttgattatagtggaattcacaccaccgcccagttcaacgtcaagattttcgacctcagcggaaagggcgacaacaagtggttctcggacccgctctctaacttcatgttcgacgagaacatgatttctttcggtgccgacaacctgtcgctgaccctcaacgaggagggcgactcctactctatcaagtccaccgtcaacggcggcgccctagtggacatcaagttctcccggactgcacccggtttcgtcgtcggcaaggacggtacctcatactttggaaccgaccccgataagccatggggctccatgcgccacgctttctggccccgttgtgccgccgaaggcactattaccaccaaggacaagacctacgacatgactggtcgtggtctcttcatcatggccctgcagggcatgaagcctcaccacgctggtaagaagccctatacatagactgacaaccagaaccgctttatgctaacaaacacacagccgcccgctggaacttcattaacttccagacccctacctactccgccgtcatgatggagtacaccactcccccctcctacggctccaccaccgtcaacgtcggtggtattgtcaaggatggcaaggtaatctatgtcggcacaaacaacacagtgactcacacagaaaccggccacgacgagggcagtgactggcccgcgcccaaggccatcaagtgggagtggagcggcaagacaaccgacgacaaggagctcacagccgaagtcagcggcggcctcggttcgcgattggatcgcatcgacgtcatggccgaggtgccaggcttcattaagagcattgctggcagtgttgccggtactcggccgtacatcttccaggtatgtcccatcttaccctcgtcttgtttattatcaagatagttatagctaactctccttgtacagtactcgcctcaggacaagctgtccttgaagctgaagatcggcgatgaggagatcaccgaggagggaactatgttctccgagtcgactttcatctcgtaaaggtcgcccgcctaattcgcgtacatagtacctcattctcccctgcgggacttgattgttggcgttcgttgtgatggttttcgtgatgccctcatttatgtctagaggatcggtttgactgcttcttcccttatgcggaccagataatccacagactgtatacatgatacttaatgctattttgaccatatcctgaaaatatattagtagtctgtagatacgtaatgaggtgaagagtacactcgagtttcatagggcatagtgatagaatacatgtaggatgtaagtaggcgaaagttactgtgatgtacaggcaagatcagacgttcccggtgctgaccaagaggaaaatgtacaaagaaagatacaaagtcgaatacaatacaattgaactcagaacaagaaatagaaatagaaatccgccagcggtgctagtagaacaagaatacaacccttctaggaactctagaaaaagagttaaacaaaaagaggtacaaatcaggcatcgaccatcaactgctctccttcatcaagaagagtcgtaacccgcgagagatcagaaatcatcttacggccatggccgaccaacaagagcttctcggcattggcagggagacccaggtaggtagggggttcacgctccggcagattgttaacccagacgacgaactcgcgcatgctagtggtctccggcagcgtcaaaagattgtcgttctctacacccgagacgagcttgtagccatcttcgaaggcggcgggtgtaaggaagctattgaccaggttctcgagctgctggtaatcgcctgcgtcgtcgattttaccaccgtacatctctgcgacaagagtgcggatcatctcccagggaatcttctgcggagccacgttggaacggccttgggacactgaatcgacccagtagtcaatgatgtgggctgagcactcgtactgaggggaaaatgttagcgtctctatggggaataaatggatgtagggtacttacgtcgctgtcgttgaactcccagaagcccttccatccaaggcttggtgcatagcggagcctttcctggacgacggcgtgcaagaagcagagtaagagatagacacgggccttttcgactggaggcttgctggctctcacactcagcgaagagagggaatccttcatgttggcacgcacacccgcgggctgttcgtacatcagcacacgcgaggcccggatcaaattgacagggatcttagggctggactccatagataggaaaagacggaattccttgtgtggtttgagagaatccagtctcttctcgagactttgcagccaagcaggcgccaggtggacgttcttgaccagcacccagttaccgactgcagctgcgttgctgatggccttgtccgcgctttcgagaccttcgttagatcccatggcaatgttggcgcaggttgcgcgggtggcttcaacaagagcgtcgaccttgtaactggcatcgaagccagggctggagctgagcgcgatgggcctggttgcagtgacctggtcaactacatcctttaggtcggcaccaccctcgaacagctcgcggccgaacaccgcctcgacgaaacgctcggcactgggaacaaatcggtccatgcggcaaatcttgacaaggagcaaggaccgaagcagttgatccagttgcgacacactctcgtcccacataaccgggaccacgttctctgcaagctcctcgccgaagaaacgatcccactgttcttgggtgacgtttggaatatgctctttgaagagggacatgttggccagcctcgtcatcacttggtcgcgagtgtccacagaagttgaaagatccgcgtcctccactgtctcatccaggacgcggtcgagaatggtcctgtccatggggaatggggtagcttgagcaagcagaatggcaagtgtgatgcgatccttttgaacgagaccaagggaggttcgcttataggtgttgatgaacaagtccctaacaataatctggacacgcgcagcatgatccttctcctgagcaaggcgtttgttctggtagagaacagaattgaaaatatcgacgaaatactgcagagagaactggtagaagtgattgatgtggtgaagttgttctagaaccgcaaagacggcactgcaggaacgggcaatgatgctgtagttctgcgtaacgttgtccacctcgagcataacaccttcggtttgatccatcttcagagaaatctcggcagcctcctttttgagagtttcaagagtttcaatgacattgtcatcatcgagaatgttaccacgggactcgttgagcgcctgcaaaagacgcttctcgagttgtctaaggtggaccttgaactctccttgcatcttgacaaggttgttgcgacgttcatcgacatcgggccgctcgaatttcaggacatcattcaaagactgtgtttgcaagctgctctgggtgacagtgaagttgacgaaggtagttcgactgcaaatatccggcgggaatgtggcagatggatcccgggtggataggaagagcttgaaggatggcgagaaatcgatttcttgcttgcccaattgaatgaggacacgaccaccagttttctggtattccttgttgagaacgtgattgagaatcgggtccagatgctcggcatcctggataaggatggggtttccgaaacgcaacgcgctctccaattgcttgacaaaggaatcgtccaagaagctcgtgacagtgagtttgcgatctttgctttccttctgtaaaaattctgtaatacggccagagggatcaacaataagcgggtatctgttgaatctcttgagaatgatggcgttctctgtgcaaagatcgtcaacgggaagagaatgactctgccaggtcaagcgttcatcggcattagacaagtattccgttatgggattgtgaggcttgaattgaatgccagatgccgccagttggtggacccagtcctcagccattgccttacggaattgctgatcgtaaagaccagcatatgcaaggaatgcagctgcaatgagaacatcgccaacgagagtgctgatctgagtttcgaatgacttgctcccttcttcccagcgcccacgctcagaggacaaactatcaagcaaacgaacactgcggtcgaccttgaattgaacccgattcatctcggtcttgattgcctgcgtctcgctgataagggcagcgtactcggccttgtaggtggcgatgctagtttcgaggtcattgatggtattttcgatggcctgagcttcggccttggtttgcagggcctgctcctcaagttgatccacctcttcacgtagagggccaacacgatcaaggatcgcagagtagttgacctgggcttcaacccattgcactaaaggaccgcaggccttactggcacggttaactcgctcataggtgaagtcttccttcgacaggaattcattctgcatcttagtacggtgtctgcgcgtcatctggcgctcattgtcgtagttaacgatgctggcgatgaaatcatcccgacgaatgagaccttggattgttttccaactatcgacggtgtgtccgaggagtgtgcatacggcttccagggcaagtcggacgctagccggagggttacccatggaccgaacttccgtgaggtgttgacgtttaatgttgctgacactcttctgggcttccaggacagcgggttcagcccgggccaaatcgttcaacacgacttctttccgagttgccacttccttctcttgtatctctaacgcggcctgcacttccaatgaaacgtgcttccgctgttctgcttcttgctgatcagcgaccatacgctgcaatttatcgttcgcttccgtatccttcttctccaattgtgtcttcttctgtgcgagactagctcgaaggtcgctcactttgtcgacggtgtcatgaagcttttcgagaccaatgttcaagtgacgttgttgctcctcgagatcctcgcgcttctcgttgaaaagcttgacatactgcgcaacaaagtcgagataatggcgaggggtgaggaaagtcgtccggccctgttgtttgtggagccgcccattgaagcgatgcaaggagtggtgaataaacaccatggaattgacaacagtgtctctgtgtgatgctgggagagtcaactcgcggtatgctactgggatgctatcaggcgagatgaagtttggtttgtctagatcgaccgattgagtgagctcggagccaacttggaacaaggcttggtcagaccagtcacccatccagttcaggacacaacgattgaacaaggcgggactagtagctgcttttgaagatagaccctcctctggcgggttcatggtaaagacaacgtgcaggttcttaacgatttgcgaggtgaaccacttgtacagctcctcctgcgaatctaggagcaagccttgacgctgggcaccctctttacaagcagtcatcaatgaggagaattcgtcgccctcaaagagaccagggacttctgcgtttgcaagcaaagtattcatgcgttccaggaatccagagtcaagaacgtttgattcatccatgacaaagcaaatcttttcgcctttgcatcctgcccggcgaagaacgctgcgaagatcgtcatcgaaatcttccgaagagtacttcccgtgtaccttgatctggaagaccttcaaaccattcatccaagcgacgaagcgagacagagttgtctttccacttccactcacaccgataagaatgagatgaccttgaggctggcggaagactcgatcgatgcgtagcgcgtgctcaaggacatcgttgaacaacacaagcggaacatccacctcttcttcgcagaaggttcttagacgtgccttcacgaattcacgcagactctcctgttcgacaggcacgtagttcttggacagccagttggagaacaggataggacccttcaatgcttcttgttcatcgattgaagggaaatgttccaaggcaatgcggcgaacagcatctgccgtccaagctctctcatcttcatccacgagtctgtcctggaatagacgcagggcttcgtgcgcccaaatgcggaccaggccttcaacagaaagggtttccaatggcttgatggcctcatacagaccccgaacccatctagtgagctcacgaggcgagtaaacgtagtggggctggatttggggcgtgaagcgggtttgggattcgaggtagaactgaaccatggccctggtgagggcctcggagtatccacgcagcaacggaaggatcttaagcacagcagagttgaacgtgccatagatttggttgagagagatctcgccggggtagtcgaccatgatcaggggagcatgacgcaggaatctctcagccatcggtgtacgaccagcatccgtaggaggattacaggcaccaacaaattgaatgcgatccagggtgacccaggtcttgtcggtggttcgccagaagccattctgctccacaagttggcgcaggaatgagatggcacgctgagtgccgtagcgatcaggggccggaagattgatctcgtcgcagaaaatgacaagccagcggccgatctggttcggagacatcaccacaccattaagagtcttcttgtactcacagtactgctcaaaggtcttgatcaggaggtcaggtgtggtggcactcgagaagttgagaccaacgacctccatgttcgggagctttcggagcgcggcgaacaatgtcatggtcttaccggatccaggaggaccgcagagcaacaaaggcttatgctcagcaagccacgagtacaacacatcttcatgacggatagtatcgaccgtggggataatgacatcggtttgagtgacggaatgtgtgttgatatcaatcgtgggcacctgtgaatgccaactagtccagtcagacttgggaagaagaacgtcatagtcaatcaaagatgaatcgccgtccggtggaagatcgatagtagacattccagtgatgtattttccgaactccttgcgatcacttagtggacaatcaccggtaagagaccagaccagcgtcagaagaagcttcttggacatgtaggactcaatctgttcagagtccagagggaagtctggatgctggacattgtattcgaggacgtttcggcaggccttgttcaacaagctgaagagagtgttgagggcgcggatatccgtgaactccatgatatggttgtatttctttgcttccaccaaagctctgagaaccaggtcatcaacctccaagaactgtttgaggattgttgcaactgtgtcctgggcatcctgtgtccggattactgctgtccctgcgggagcactgtcttcatccaggtcctcgaatgtctttgtcctgaggctttcgacgtagttggaaatcatcatggttggagtaacagtgtcggcattgaaccacaccataccgcaacgactgactgtggcaagcgtggcatacttcaagctttcaacttcaaacatgatgcgaacatttgaaggtaggttgagacgctctccattgggaagggtgaggagtttgttgtcatctagaacactgttcaggttctcaacccattcagggtcaacatctccgtcgaaaacaatccaatggcgtttgctatcctcgcctcggaggttgtctacgatctttctcagaattccagtgaagagaccgtctgtccattcacgggtagtgctgtcaaggttaccatagagagattccttagacatgaccttagagtcgatgatgtgagagacgccctcaacgccctcaatgcgctgcatcgcttgcagtaaaatcttccaggcagttgatttaccggctcctgacttaccaaccatcataacaccatggtggatgcattgaatttgatagagttgcagtgccttggtgatccacatctcactgtcgacgagatgttgctctttggtagcaatatcacggatcgcttgggtgagtttctcgaagttggcaggcacataatccacgccagcgaagtcttccacctggatttccagcatgatttccacatcttctcgaataagcttaggagcaattgtctcccggagactttgaacaatgatttgaggttcaatgacatcctcggggcctagatctccctcggtactggccagacgcgcgcgcttgagaccgcctgagctaacaagaacactcttcaatgcacggagaccgaagtcgtaatgagcctgcttggaaagtcgggaagcacagtggtcgaagaaggggactgtctgcttggagagagacttggcctgcttgaaaccttgcgagaaaagcatcacttcagcaatcagttccttatccggtttggacatggcaacactgcggaacagcttcttcaagttgtctggcaaattggaacgaccagcgtagccagggttcatggtaatgaaaattccggtgttggagttcacagcgagtcgtcttcctacgagttcaatttgggccttgtcgccatctccgccagttttcagaccaatctggatgttctggatctgctgagagacggccgacaaaatacgttcttccagacggttgaactcgtcaaagcaaccccacgctccaacctgacagataccgaggaaaattcgacccattgcttggaaatcgaatgtgtcgtcacaacagaagacgagggtgaaacgaccgagttgcaggcccaatgccttgactgactcggttttaccggtaccagcagggccatatggcgaaccacccagtctctggcaaagagcctgagtaagggtgaggaaacaacgatctgtgagaggcgtgcggacaagacgctcaggcacacctaaatactcgaatccataggcgagcttcgcgttggccatgtggacatataggcgctccaagaaatcgcccgaatcgtggaagacataacgcatctggagaagccaatggtagtgagttggcgttgtggcattgagacttatgagcttggagatgcagtcgcgctggtgaacgaattccgtgatcatatgctcacacttcttgcgagtgatcggatcgagttcaccaagcaccgtcgcagccagcaactcgagaatccgaacttcggaaccgtgcaacgcagggagggttgcacctccttcctccaaggaatgttgcactgcgttggtccaagtgacctgactggcgaggaccacaatctgagcagggtagttagacaagaagtcattgaaagccgttcggtccacatcgctgctatggtaaagaactccaaattgttcaacggcctcgccgagaagttctgctagagtcaacttcatgctgttctctagcgcggagagccaatcattaatacgaggagtcttgaggaggttaacctctttcttcaaacggacttcttcgccctccttggaggtaaatgcaacaatattgttatcgtcatccatgacaaggcctgacatcccagcgaacatcttcttgaaatgcttggcgacacggaagatatcattgctgttaccaatgatctccaacaagtcctcatctccaacaaagtaaaagcgaggaaatgagacacgttcacgctccaaatattcaccgagtgccttttggattttgttcagcaaatcagccagtctctccaaggacttttgaacatctacaattgcgagaatatccaaaacgaacggagatttgtacaccttcttcatgacagtaaagaattccgagttgatattctggaaacggcccgactccaaaggaagaagatgcttgatgtctgcgttgccggtaaagacgccttccaggtagacccattgtcgctggacgtcgatccatacgtcgaaaaggacatggactcggttcagtttatcttcccatgatgtagcttcttcttcaaattctttgtagtacggagaatgtctcatggcctggagggagttcagattttcgctgcacttggcgaacaggtcgtcaaagccttttatcagacggcatttgttctggtagtgtactaggtccagagaatagttctgccatgtctcccgaacagacttcaggaattcctccaatgccatctcaccctgtgcctgtgcaatgatagcacgaatgatggaatcgcttgatgcgagttgtaaatcccagacatcaccaagggtcaaagagacaagagagaaacgcttgtcgggtttaagactcttgtatattttgtgccaatgtctttccttgacggcttcggatttcatgtctgacaaaagtgagttgactttcagcagctgccgaagaacattctgaatgtgttcaaaggcagcatactgtctcatgcgactgggcatctccttggtcattttgatcaagttgtcaagagactgtcggagcttcctaggttgcacgctggtccacagcccatcgcgaaggtcattaagactgttccagattgttgctagagcagcccagacagacatgaagtcttggacctcctcgaggatggggggaagtgatgactcggaacttgggggaagatcgagagcttccttggcctttgagaccatctcaaactcagactggagagcctcgaggcgagactggaaagagctcagggtgcgagatgcttcctcgggtggaatagtgccagagaccggcttctcatcattccatttaccgataacttcggcaatcttgccggcaatgacgtggtcttcagcgctaatctttgcacgcaaggcttcggtttgctcgttgacaattttgctcttgcggctaagcagctcgttaagggctgcccattcaccatcaacattctcaacgtgaagccagtcatacgggaactggtaacgttggcgggcgagtgtggtttggccttgacggaagaggtcaacctcgggctcccagactcgagtcttccgcttgcactgctgaacaatggtaatgaaagacacggcatgcgccgttgaagaggcctctagggtttggccttccaagtcccttcgggcagcagcaatctcggaatgaacctctctcatgcggccgccaagcttagaaccaaacttcacgaggatctcatgctgccactggtcgtatttggcattcaccttggtttggacttgctcgtaatcaatcctgatatttccgaagccgcggctgacttcagaagtatcgaatgtagcccgactctttctaatttcctgaagaagctgaagccattgagacagatcatctcccaggatttcgtaaacctgctcagaccgaagatcccaaagtgattggaactgcagccacttatcgacatactcagaaacatccttcagtctggactcgacaacattgtagacttcattgagctgatcggtgcaattttgcgggaggtcggagaagcagacttcggacaggcgaacattttgcacgacaatggagatctgataacgcgagggcttgatcttttccagattgcaaatcacaccgagccatgcatcaaagtgggagaaccagcttgcgcgtgcaaattgtaacggcgggtccagatggaggacttggtttctcatcagaatctcgtggaagagttccgggaactggatcttgtaattcaaagcatccgcttcggccgtcgcaagttgatgatgagaagtcgagttttcgttgttgataccttggaaggtcataatccactcgcgcacagcgcgaataagtcggtcgcgcagaattgcctcgatgcttccattaagctcagcaacccagtatccaaggttcacgtaattttcgaggttaagcttatcaacagcaacttggatgctgtccaagcgttgcttgaaagctgatgagtcgtatgggcatgtcttgagttcatggatcgatttctgaatgttctcattgatggcgtcaagaacgctagttttcgtctgaagtgtcgatgctgaaacggcaaactcacggacaaattgaacatgcttgctttcagaccgaccaggcaacgatgcctccatgccatttgccaatgctgactgcttgacgtgtagctcgtaagaatggacgaaggattcccaccggagagggatacccttggcaaccataatctgtgcatcgttcatgtagccgttgagcagcatattgacatcggtcatcgacgcgattgctcgattggtctgcaacagggtgcgaacactctccatcaggctaatggcgtaggggtaaacacgcttagcctccttcgagatattgctgacagcatgaggaacttggaagttgagccagataagattgcggacctccttgaagagggcaattatctgagcatcgaagttgactgccagctcccaaacgtttcctgcagatcggttgcgcacaacattaaacaaccgtccagcaattgtaaaatgacgccgttgaacatcccacagccatgactcgaaaacaggccgggtatcgagcttcttacggaacaggttaccctcattctgtaatttctggccctctgcgtgtaggtgccagttctcaccgagaacattctcgacctttcgcatgtagccatcaagctgatgctcgatctggcgagtccaaataatggcgcccgacacggggggcaggtcccgcagttgggccatagcatgagcttccgaattaccgtactgttgtttgaagcgctcatgcaaagcactgatgtctcgcttgacattgtcaataagttgcgtttgatattcgccaattgcaccacgaatcttaggacgaacgagaagggcgttgaacttcgagaacacacggaacatctcattggcattcctggcggtcgccagacggtcacgaaggcgagcaatgatagagttctcaacacgggaagtacgctcactgtaggcaatttcagcctgttcccaggtgagagatccctccggtgagacatccaaaacgtccacgttcttgagagcagcgtaggcgtgcgcaacttcctctacggcatcaacatcaccaatctcctcgactatcacagcgccgtcagcatcaactccagctccattctcggcagatgaagagctgttgggacctagaacgttgataatggttttctggagctgttcatggttgatcctgaatgtgtcgacgtacttcagccgctcgcgggttttgtcgtgtctcgcattgatcttaataggaataaatttttcgttacgacgccgtgttgattcgcgagcaacgtttgtgaattccttcaagttctcatcccaagtgcgccaaatcgcttgtgtggtcttcatcaaagaccggaactcgcgatagtccagatgcaagatcgtacgtccattgatcagctcatggatcttcttatcaagatcgcccgagattgcttcaacgagcgaaagtgcccgcttaatggggtaggggcaaatctttagctttttattcaggtgagtgaaaatcaagtttagtgattcctggaccttctgcaaagaggtcgcagacaggagttcatcgagaggaaagtctcgcatcagctggttgtacttctggaccaattcagtggcctctttcagcccagtgtctgccacgaaactgagggttggttggtatcgtttcgcatggcgaagaatgtccatagtcaaccgaacaccatcgctttggagctgagcttcgattccctccaaggcagcctctaaggacagccagaagttgacctcaggagaagcagattcgctgtcgggatcacgggacatcttagtgattgtctgaatggatctaatccaaccgttcacgacattctgaatgctgtttgtgaaagcgctgctctccaataccgccgatggaatcaactcgaccgatggtttgataccacgtgtttccgcttccttaagagcagcctgcaccatttcatgaagaggcaggttcagagctggaatttctacattctgctggaggtgcatcaaccctagctccaaatctgcgaatctcttctttgttcctgggataccagtcttcgcttccgtatccgttttcgatttcgtgccgatagctgtctcctggctgcgagtgtaggattcgaagtaaggactcagaccatggtgtatcatcaaatgtaggatttggtagggtgacatggaattcccctgctgggcggtggtattgctgagagtagcggggccggggagattcatgacttggacttgcgacgctatcggaagactcatgtcgattggaacaggccgttttatgatcgccacggaggatacggttgtaggagcggacgagatatcggaggagagattgtaggcatatttcaccgctgtatcttcgcggcataattagcagcatatttttgaatgcctatgcacttgggtttgacataccttggtcctccgtttcactgtcggtttcctccactgtcacaatgtccttttgcacatagagtgcaacttgcgattctgaggcaaatcgtgtacaccgttgtagtgtttcattgtactttgattccgaaagcaagctcccagcgctttccagctcgaacctttgggctcccagtgtcacctgaagcacttcggtcaagtactgaatgaccgcgccggaatcaaccagagctgcggtctctggtgctgaggcgccatttggcacacctgatgaggcgacctccatgatgccgagattattatgacaaattcaaagtgttcatcggtggtaaggaataataggagcgcggatcgggtgggtgtttgggatgttgagatcgcgtcaagcgggttgggccgaaaaacacagagcaaaaggataatgacaaaggctggaaagaaagctaaaatctaatcgattaaaaatggttgcaaagataaattccaggcctatgccgtcctgggtcttatgtctgttgcagatcaaaaagatacgcggcgtgtttgctttacttcaggggatgaacactattccccattaggttaagcgtgacacgacccccatgtgacaccgcacatccatggctctcgtccctatcccgttcctttcgaagtataagattcaccttaatattgacgggtacattatcgggttactaggtaatggaatttgaatctcataatttgcaaatggtactaaaatgaaacaaagaacaaatttcgcccaatctgtctgtcctccacaacttctctccttttcaaattgccgttccgatacttgcgcggtccacggtggcttgtccaccttgacaagcacagtgatatttctctcggaactcggaaagagacattccatcaataacagccaatgcccgggtactagccctcactttagcataccgactagaagatgcgactgcgctggcaatggattggccgtgcaccataaccgcagcaaataccctgggggtctccccttccacggcagggacctctgcagatttcaagcagtaatcggtgcattggtagctgtgagtcatttggctatgaaggaatgtctatgacctattagcataaagcatataatctcaggggcaggagatggtcttaccgttggatgtctgtttgcaaatgtgtcgtaaatagacatgtcgtggaaaaatggtaggatatgcatgttgaagaaggcttcaataactgtgaagtcgaagccagagtcaacaaatatagcacccagataagcctcaagcatgtcgggaagacactgtaattcgtgagcatgtggattgtgtccatgtcaaataaggaacttacctttggggaatctgacgtcgaaagccagtagtcgacctctccgttgccttcgctctctgcaagctgaatttcctctgcgtatttgttgttttggatcatgagaggattgctgaaatgctgaagatgaacatgaagccccagttttacagccaaagcaccaagaaatttgttggataccatagccatctattcatgttagtcggcacttgcttgtggcttgacattgtgaaaaaaaaaatttacggaccttgtgttcagtcaaccactgcggatctcggttggggaaccgatgaaacaagtgctccacgcacaccatatccaggagtgcatcacccaagaactcgagcctctgataacaaggcaccttagcccatgccaatggataagatggatgcgtgaaagccgaccgcaggagacgagggtacttgaactcgtagcctactttctcgaagatttgctgggccaggttcttttcaaatccatccgctgccctgttctgatacaaaggcatggaatatgctgagaggtagtcttcccatgaggttgccgtgtggttatgactgttgacgaagacggtgacagctttgatagccatatcataccgattgtcatcacctcccgagagcaacgatgctcctatcaatgcctcgcagacatctgctatagtcttctcagccaaggagtgcttaccttcactggcaaaaaacttggcgtggtcccgaccatactcgagcgaaagacctggggggtaccacatatgtctgtgattaagtgtcagtaaaacacacaattgttgggacaaaatgtaaagaacataccgagagaacccacggctacgtatgtactcatagagtttcagttcaattgcgtttctgaacaggttcttgttgcagatgagacacattctgttaacgtggtagtcgtattcatcatcctccggattttgaataaagagcgaaatggatgttgccatcttgagcacagagtcccctagtagttcaaggcgctcgtaatttttccccattcctcgttgaacgtgaatctgtaggctccgatgctcttcggtgttgtctgaatccttggtgaaggcctccagggcatactcgagcttaatgccaccaagacctagcatattgcatccctcctgggcgatcaggtaggattccattcgcgtgataattgctggaaagacaaaacacgtcgcggccacagacgtggaaatctgagttacatgttagcatattggataaactgaaacgtatactggtgaagaactaaccgccgatatagccaagggctgagggcaaatgacacatctcgagttggatgctttctcttcctcggccgctttatcaaggaagttccgccgaaggcagatcaactccgcctggaagaccggttgggtccagatacatcggttgaagaatttgggacgtgaatttttgctcaaactcaaggaccaattcatgatattgtctgaccattttcgagatggtgcgtaggatgggggtgggtctgaaggacgtagattggggtctatagcaagcgggaagtatcgatactttccattccaatcgtcgtagatgaatcgagtcagcaacgattctggctccatgtcagaagaccacataagcttggggttatctcggacatattgtaaagcctcccagtcaattatgtcaaagatacttgttgacgttccaatgtcgacatcttctcgagcaggcgcaagccagtatggaaactgttccgagacgtgcttataggtcttgtgaaacacgtcatgaaagacagcaagtgtaaatacagtcagatattcgagatctttggaagcaacctcgaggccgtcgtcaatacacaaagactgaactgtagtctcgatatccttatccaagaagaccgggaaagtcggaattgtagtgattcgctctcgtgtaagcaatacaatacttccatgagctcgagccagaggctttgatggaatgagacgaataactatcgcgtagaggcgtgtgggaacggttccctgcagcctagcccagattgagggcttagtacgcattcggtactgatcagtcctctttgaagtaatagccagtttggcattgcgcattgctggcaagcgcttgtggtagatagagttgaagtgctcatccaacagattcttttggcgaagcagcatacacgcatcaaaagcagcggactgcttggcgagtgatttcttcgattcggaacgtccaatcactcttcgcacaggcgacttctccggcataattatctcacagctgaatgattcgttctctgacatcacaatgtatgtgaccgatgctgatatctcattttcgtattgctagaatttggtcagcgttagctttgatgaaagccatcagaggcaaactgattcttaccaatgagctggcaaatcgtgccaatacaccaatcgcatggcgacaggttaacatggcacctgtgttcgggatggtgtatgttctcttcctatcttcctcgtgaataagccctttcgtatcgtgatcggctccgtacaattttcgattctccggcagcagattgcagaaattcttcatgaggtgctgtttatgtcagttagttcagtgctctattacctgcgaagcacccttacctctgctcttcgaacttcctgtagtctcatgctgtggttgtgattgccactttcgaccatagttgcgtactgcagagtagtgagtaaatcagttgcgtctcataaaggggaaggaaatctaaccactgaatcagcgcttctggcacggcctcggctttggacatattgaattaccgtgtcaaacagatcgaatctttgctagtcagtaaaagtaacagttgtgattagaatggtgaatgacataccttaccaccagattacaatctgggatgtcaaggccttcctctgcgaccgatgttgcaaactggaaatgattagactttctctataagttgttttttcgggtcgtgtaaaagctcaccaagcagttgacttcactttttcggaacttgaccaagacaagaaactgccgacgaaacgtggaattcattcctagagcatctcctttgcgaacaccaaccaaagcatcgggacggaggtttgggagttgcagcttttcgcacagctgtaacattattttagctgtattgcgccgttgtgtgaacacaatgcatttggtatctggcgacttcgcaaactgttcttgcaactttctcattaaaagctctactttggagctgagatcagccggcgtaaatgcctggttttcaatgtattccttgacgagctggttggcttcttggatccgcttaatgtcctctgaggccttttcagaatcctggggatcagaatcggtgactttgccgatactaccctccagcttgggcagcacttcgtcagccagggccaaggcccatacctggtctgcgcaccaagcccctaattccgagcttgcaaccgatgcaaatcgaaatgcgccctctagtattggcatatcaccatacttgactttcaaagtaccatgtagattggtctcaaacggcggaggaagcttgtcgtagacccattcctcttccattggcttgttcacgaaattccgcaggagggtaagatctgaggttgttgcaatgcgactatctaaaagagtctcaagttggctatatacagtcagcaaaagcttccaatttcggttagttagggtgctcacattgctgcttccgctatgtcacacttagcatcaaccggggaagcggtcatcccgaagatccttgggcgcttttcaggatccgctttcagatagctgtctcggatgatactaataaatgtcagctcttgtcatcatgttacaattgaaaaatgggctgcataccgagcatacggatgctccttcttggcatggtgagcttcgtcgaagatcagaagattgatctggtcaattcttatatggccattcagtagagattggtttagaatctccgccgtgcatacaatcaccatgtacttttcaagatgcttgttccacgtctgttggtcccaaagatcgggtcccagattgccataaaaatgagcgactctttgatcgagattgtttctcaataccgcagactgttgaaaaaccaaagtcacactgtcgaccaggaaaaaggcaacgcgaggacttgcgccatttgcacgtttgttgagttcgatttggagaatatgcttgagcaaaagcacggccactaaagtcttcccagaccctgtgtcgagaaccgcgatcgtgttgctagcccgtgctctttcaaagagctcgatttggtattcgcgaggatctagaactccacctccgggctctgtattcgcgagcaaacgagcagttgaaagttccgcatcagatagttcgatatgtgatgcattgggaccgtctttaggcccgttgacgacatggtcttcaagccttccgaactgtcagcattggtcttcaagctaagatatatcaagaacttacagcgcattaaacatagcattttgagttctgtgtcggtgcgacaccttcaattgtggggtcgcagcttcgtcgccagatagatctgagctagtatcttcagcctccatcttagctgtcttaccctgtgctagactatgttgaagaagaaatgctgaagaagaggaagaggaagaataaataaagctacggaagtgactcaaacctgggcaagagaggaaaccgtattttacttagcaagcgccgacgacataatacgtttttgtaccccgtcctacttagacatgaatttctcataagtgaagtgagaatgatagatcgcaatgtttgtaggtgcattgagaaggctttcaagaatggctccatgtgcttaacaaaagtccatcaatgactgccttaagtcttttttttgatattccaatgatattgcatttttcttatcattagaaaattgacggcatttacacttatacaataaattacatgttcctatgctctgtcgtcctatatatatccattcatgcatccaggcatgacatccgatgagaatataaactaggactgaaggtgcctgtgcacatgctaaaatgagtataataagagaattgagccatcaatgattgaaaagtaacgactatctatagagagactaaaatgaaggagagccctagaggagaataagagtggaatgaacacatatcaacacaaacccgccactcagtatacagaaaaaacatacatcgactcatataagagtagaagcctttggactaagcgtatagtcttgataccaaccttggaacaagtatagaactcaaaaaattgaggatcgaagtatgagcttctttatcaaacgcttatcggataaaagcttggccttatcgccttatcgtatttccaaaactcagatcgagatcgcgggggacatgtgagcccctactaagcacctctcataacctatctccgacctaatataagcccgcaaggccaatatctgaaccaatggaagaaccgcagagtcttcgctctctatttgcatcagcaaaagagcaaaaagatgcattgggatcgcggggtgacaccaacgctgagacctaccgagacgaggtgaatgcgacgatagccaaattccaagaatgccagcgtcaagtgagcatgctgtccttgtttagttctaatgagttgttggaagatatttcgaccggtgatctccagtacgccaccttgattccggcattgcgttgcccattcggctgatttgttgtccaggtacatgacactggaatttcatctagctgagctcttgcagcgagtttctgactcagatcgtgaagccgtcctcaagcgtgcgctcgaagaatatgagaaatacctgatgcgtttggatgagtacctgctactctctggcggggataagaagctctttgagcaatacatggccaatccgacctcttttaccctggcgccagctaacgacgctgccgccagacgggaaattaaagtgacacggtttcgggaagaaaaagaactaaagcagaaactggaggtatgcgggatcctttgctggatattgtttggcgttcttgcttaccccatctaaagtatttcggacgcaacgaagctcgactgcaaagcgacgacgatgacacccgatccctctatctagcggagcttcagctttacacccaccagaccttccaggcattagatctcctgatccaagaattgtcgatactttcaggtatgcgcaatgcgccgcctcgccctccaccgacggacgatcccagacagcgaagcaatattggaggtttgaattactcagagaagctagatccttcagtgtcacagctcttgaagggaggcagaggcggtcctatcctgaacagcaaaggaaagccaatgcagccgttcacgttgttgggtcggcgctcagaaatgcaacaaggagtctttcgttcgggccataaccttcctaccatgacaattgatgaatatctcgaggaagaacacagacgaggaaatgtcatcgaaggaggaggcgagaagtctggcatcaaaccgcaagttgacgaggatgatcacaacattgccgaccaggaaacgatgaaggcacgaaattgggacgagtacacggaagctaatccgaagggtgctggaaacacactgaaccggggataatgtaaaataaccgtcatgaacagagctgctttactatgtccaaacagccacgatagacagggttcttggtgaatatccttgatatattgagcgagtacgggtatactagacaagaaaactcgttcacttcattttcaacagggtatatctgcctagttacagtaaaagttgacctgaacattcagactgcagtggaaacagtctccttggccttgttctgttggatagcctcgagaatgtctccagcgccgtcggcgaccagggccttggctacggtgacgccgaaggcctcagcactttcagcagaggtgacgtcggcttccaattctacctgagcacattctttgccatcgacactgacgaccacagaccgcattcgcaactgcttggcaccctgcgcattttggacccattcggtttcaacgcctagcggggcactgcagcctccctcaagagtccgcaaaagactgcgctcagccaagaccgagaatgtggtatcttgatcaccaatcgtgtccaacatattctgcaaaacagcgtcttccttgcgaatttcgatgccaagggcaccctgtccgacagcatagagcatgccgctgttcttggagtccaaatattgggtgatacgatccgtcaaatcaagacgcagcagaccagcagcggcaagaatgacacatgtgtacgggctatcttcagcatctagctttgataggcgagtgccgatgttaccacggacatcctggactttcaggtgggggtatttctgggccaactgtgctgtgcggcggatggacgaggttccaactacggacccggcggggatctcggaaagacttttgtatggcaacccttgtttcaccacaagtacatccctgctatcttcgcggggcatagtcgggcctagcttgcaggaagaggggagagtagtggggacatctgataagattgcataagtcgtcgtcagctcttttttagggtagaaacagctactctgtgtgagattgggatattatcagacctttcagcgagtggacgataagatcgacctgtccgttgatcatcaattcctccaattcctccgtccacaggttcttggtggtgaaatcccgtagtgcgatagtggtgttcaggtcaccggttgtctccttggagaataccttatattcatattgcgggaatgctttcttcaatgcctcgaggactaaatctgtctggagcagagccagtttagatttgcgggtgccgatggtaaaggtctttttggtgggggcgggggtagtcattttgaggcggaaagaaagcgtatgcagagaatgggcttagagagtatgcgagtagatgtacggggttgtatgagctatgcccgcaagataccagatcgccgaggaaagtcaggcgaagaggcgaagtgggtttggagaactccgatcacgggacacatgcagatcacctgaacagagattacgacgttgggcacatacaataatctgggaaataggaataaatatataagaatagtagactcatagttattacaatgcatgtagatctatcagattagatataaaccgtcaacggcaaatcccttaattcttccccggttgatcatcaacctcggctacagggcgtggagattgcgaggcatgcgacttatctcccccggacttcccatctcatctacgtgcttctggaacctccccggccatctctcctctacatataattcattcacatccccttcatcccttgtcccatcactgattcctcattctccatacaatttacacttacaccttcatacttcatattcccggattcctatctttgccaccctattccatcatcactagggcccgcacaagatgggatccaacggtagaactactaagattccccttgtacctcttcccaagggctcggtcctgctcccgggcgtgactctacgcattccagtctccaaccgtcccgatctcgccaatcttctgtcgtcactagtggacaagccttcgaagcgagatgcgaatactatcaccttcggatgtgttccactcaactcaccttttttgagccgggatggacagcagctcctcgaaggcgacgactcggattcagagcgaaaggagcaatatgactcaattgacgccggtcaggcacggaaagaggacttgttccgatgcggaactgttggcaaagtcatcggagttcagcgccgggcctactcggagccatttttacttgtccaaggttggcaaagattctctattaagaaggtcctacgagaccgcccatactttgaggctgaggtcttcattcatgacgaatcaagttagtttccacagacacaaaggacaaagaccacatggctaatcatacttcctatacttctagactctggccaaggcgatgcggaagtcgctgtgctattccaacaattgagacagctctctcgagagcttcttactctcttacgtctctcctcattgctgtcggcagcctcctctcgtctctcgccactcgttgcccgaaaattcgagctctatatatcaaagacagaattgacacaagcggggaagctggcggatttcatggcggatgtatctgacgcaagctttgaggaaaagctacgtatcctcggctcgctgaatgtcaaggaacgcttggagagggttgttgagatcctcaccagacaggcacagcatattaagagtagtgtcagggtcacctcgattggctcgacctcgttcccctcctccgccatggatatcagtcatattgacccccgtgatcgcgagttgctcgctaagcgtgcaatttcgggcctctcaggcatgacacctcctggtgggcggggcaacgacgaagagaaggaacccaatgaagtagatgagctacagcagaagctgaatgatgcgcagcttagtcccgaagctcagaaagttgcggacaaggaattgaaacgcctgcgaaagatgaaccctgccaatgccgagtacggtgtttgccggacttatctggaaaacttgtcagaaatcccatggaccaaagcgacagaggaccaacttggaccggacacattgaagaacgccaggaagcagctggatgaggaccactacggcctggagcgaatcaagaagcgactgctggagtatttggccgtgttgcgcctgaagcagtccaccaactcggatgttgaacgccagatctcaggactttccagggacttggacgcctcggcagctggagatgtcgatcatgatgtccccctgctgtcagagtctgaccggattgcattggagacccgccttgagatcctcaagtccaagcgtatgaccgacaagtcccctatcttgcttctggtcggaccccctggaactggaaagacaagtttagccaagtctgttgctgcttcgcttggccggaaattccaccggatctcccttggtggtgtcagagacgaggcggaaatccggggccatcggcgcacatatgttgcagctatgcctggtttgattgtgaatggtttgaagaaggtcggtgtttcaaacccggtcattctactggatgagattgacaaggtcggcggcgccaacttccaaggagacccggccgctgccatgctggaggttcttgatcctgaacagaatcataccttcaccgatcactatatcaatatccctatcgacctgagcaaggttcttttccttgctactgccaactccctggacacgatcccggcacctctgcttgaccgcatggagaccatctccctgtcaggatacaccaccgttgagaagcggcacattgccaagcaacacctgattccgaagcagattagatctaatggtctcaacgaggaccaagtaaatctgtcggacgaagtgattgataaaaccatcacctcatatacccgtgagtcaggtgttcgcaacctagagcgggaacttggctctatatgtcgccataaggccgtccaatttgccgacgccggggatgccgatcgcctagccgattataaccctgttgtatctgtcgacgatctggaggatatcctcgggatcgagagatttgaggaggagatcaccgagaagcacggtcgtcccggtgttgtcacaggccttgtcgcctactctactggtggccagggtagcatcctgttcatcgaggtggcagatatgcccggcaacggacgcgtccagctgaccggtaagctgggcgacgtgctcaaggaatctgtcgaagtagccctgacgtgggtgaaggcacactccttcgagctcggtctgactcacgaccccagtgaagatataatgaagagccgtagcctgcacgtccactgcccctccggcgctatccccaaggatggaccttcggctggtcttgcccacactgttgccttggtttccttgtttagcaacaaacctgtcccaccgcagatcgccatgaccggcgaggtttctctccgcggccgggttatgcccgtcggcggtatcaaagagaagctgattggtgctctgcgtgcgggcgtcaagaccgtgctgctgccggaccacaatcggaaagacgtcaaagatgtcccacaggaagtcaaggatggtctggaaatcatctatgtcaagtatgtcatcccttcctaaccttggtttaataactgctaacaattgtttcacagacacatctgggaaggattgcgccatgtctggcccgatgcgcagtggccaggccagcaccagatgaactttgttgagagccgactgtaaaccgttctcaacactataagttcaaggggctttgcctctcgcggtccccccacctaccctcatttttgcatagcgtataatagccagaggcaccattgacttgtatttaatcagattgtcttccgtgatgcgttcatgccagtcaatatttcgtgtctatatcactcaacataccgggttcagttctaacactaacaccacaactcacaattcacgaaatctattctatcataaaattcatgtaaaccttgactagattagatcagaaaagatgatacgccatattcaagatgtatacaatctaccccaagagtataatacacggatccagccaaacatggaccagaagatagagcaagaaacaccaattttccccaatggaggggatggaaaaaagtcatgaagaacaatgcaaggaatctcatcaaaacagaaaccgattaccgcgctccgtgcttccgctgcttagcataccaagccggcaacgtagcagcagggacgaaccctccattcttagccgcctggtgtggctccaagcccagagccttccaggtcggtctccaagtctccttcttctcgagcagcgccttggcctgctccttataggcttggcgcaactcttcatcgggcttttcacccttgttcggcttgggattctccttttcttgtaggtcgatctggaacttctcggcctttctccagccttcattctcccatctattggtggaaattgattagttaaaatgtcccgtctggttggaggtgcatgtgtagtattgggaatgtagagacggaagacaacggaattgaacttgaacaagacgacaacgataagtatgggtggcacatactcagtcagatccttcggctcctgggggtacacgaagggctccttcaattcaacggtcatgcgcttctgtgacttaggtcggcgccacgggccgaagcccttgttgtcacgcgagattcgtgtaattggctgtgcctggacataactgcggatgctgagggttccgactccgtacaagtgccataggtagctgcggagatcgaacttgttgaagttgagggggacgcggaattgagcatatcggggggtgaggttgggggtgcggactaaagcgacgcggaattcaggcctaatgaggcgaagaattagctgtagtgcttttggtgtttatggcaaatatccaattgagccggtcgagtttgttgagatgctgtttgggtcgacccgaattgaggttcttggaaattttgggcaacgtacatatacacgggcttgccgatgacgctgggccatttgttttttggggttggttggaccccagcctggttttgtaggcggcgcagggctttcgcctgaacactgctgagacgcaccatcgtgttgttgagtggaggaatctgggggttggaggtgcttgcggatcgcgaatcaaaactgcgttggccgatatgatcacatgacttccatgtatacgccaatagtgaacgacgcaacactcgttggacattcaagtcaggagtcagaattgattacaatgcatttttggtatagtatgaagtatgttgttaatatttcctttagaaatgaagagtttggttttctgtaagttctcccttgataagaaattttgaaaacctatattacatgctttattcatcgtaaatagtcattaaaaaggcccaggatcttttcttttactgctccgccgaccccgagactcggagttcttcgagtcgcttggtgctgtcatcgatgtcttcggagttcttggtctcgtgggcatcactggcctcttcggcttcagatccagactcttcctcatcatcctcatcctcatcctcatcctcatcctcatcgtcgtcgtcgtcgctaccattagcctccccatctcctttgactcccacctctaccatataagcctcgagctcacgggccatcttgcgtgagaagcccgaggcttcaacttcgacatccagacgcttcccaggatttttgaggagcttctttctagcctcggcgaaagtggggccctttgagtcgctcacgaagtggaacttgcgcttgaagtaccgcttgatacattccacatcacggtcgaaatacatttcagcgttaacgtggtcgacagacaacatctgcgggaaatcaatgagaaccgggaccagccggatatgctcatcttcctcttcctcagtaagttctttccccttcatttcggggtctaactcttccttgataaggatattgaactcattgaaatcaccatggataagaccatatcgggcaagatccaagatgatattcataagttcggagtatagcccagcggggtcagcgacttttgagatttggcgcagagggaaagcatcaattagactcatgacgatggtgtgtcggttctgggcgatggggtcggggacagagaatccgttctcgtgcagagccttcatgaaagcgaactccttcattgctgccaatcgagacatgtacatccatgaggctgagctgcggtgtcgtaggtagtcacggttcgtcttgactgttctgaacgagatacgaccgagacggtggattttcataatacgttgcgctccggtgctttctgccaccacgatgatgtctgattccttccccacgccgatttggttgccgaccgaatagatgaccttcgacttttgatgcgcgtgcagcgcaaggtaatccaatcctccgtatgcgagtcggtagccgtcatctataagcagaatacatatatcagtgataagatcagatgcaaaagtaaagggaatgcatacatttggcattcttgacctttgcaatcagattgattttcgcgaggtttgagattgcacgattgacaccgctgccgccccggaggcccgaaagttgcgcgatcaatggcgttggaacgacctcatgattccggctgccagcttcacactaggaataatttacatgttagctaatgattcgcgacagaatatccccaaaggaagaacatcgcggggtaaacccaaggggaggccgataagtaccgctgctagaactcggaaatcttcggaggtgaggtagcgaatagccttagcatcgagtttcatgattgtgaggaaatgaaggagcttttcactttcttccgatttccataaattgattcgctggaggccagaacttcaagaccagtcaacgatgcggcggaggaaaaaagttgataagaacctagccctatgccctatttcctatccgggatgagaaccttgatagctctcgcgttcattggagaaaaatatgcgacaattacaaggtcttgactggatatcttcgaatgtagatgaaagtcaaggggctagtcgaaaatacgtagtctactcatagatgcgagcagttgaacatatataaaaaattgtgagataaatccatgctattcttcattcgttctgaatacattagatccaacgataacccgaccactatacgagtcccgctggttgcgagcaatggatgtaaatcggggaatatctagtctagcttgcttattcggggttttcgtagtccgggttctggaagataggttagtactggtatgtctgacttgagataagggcacttactttacgcaagataaccaagccttcgagagtgctgctcagagggatgtactgctcatcctcaagctcagctctctcaccgtgtgccagcaggactggtgtgctctgagtctgccatccagtgatggtctttgggcgacccgcctggccgaccacgtccacagcctgaccgacgcggacattgacggtgagtggctgaaggtcctcatcgagggtaataaggaagcgggggaacatggcggtgatgaggaagtatagcaggtagtgatgttcagcgaggatgaattgcttggcatcgatgagtgatacaagcacagtaagcaagcccgctgctgagacacgggaaaggacctgtcggtcggtgtggaagggattgagcgtcatggtacccttgcccatgtgtagaagaccctgtgcgatgcgaaccatgaatagtgagttctggtcgcggtggtagtagctggccaattgccggagaagctgtgcgatacgggcattgttggtaccagcgccacagagacccatggcgaagatggcattaatggcaacatcgttgtcattgtcgtgactataccgggacagtgtgtcgtaaaccttcatttgtgggttgctggggctgatcaagcccatagccaggggaacagcccggcgaatattgctagatccgtagtgcatgaggtgaccgaattggcggagaatcatatcctgtccgacatcctcacccatcgcaatgagagacaggccgagaacagcatacgactggactagctcatcacccttgttctcctccttttcttcaatgatgtcattgcagatgtggagaagctcttgtagcttgagcaccgttccagtgcctgcccaagcgcatactgaggcaaggactgaagtgggcttagccatggggtgatcaactgccttgagaatgtcaaggatgacatcaacctcctcttgacggccaaagtacagaagtgccagaccaagggccatgaaccttgtccacttgtccttgagctgcttctgacgttcctcatccatcaaagtcgtcgcaattgcctcgctaacctggtggttggatgaaccaacaaagatgagacccagtgaaactgctgccatggcagacagttgcatgtctagtgaggcgtcctccacaatgggaaggaggacctcaagcagttcttccttgttggatccggcatatgctaaaccaagacccatgatggatgcaactctcatcggcacgctcttcgcctcaaggttgtcgggatcactcaagagggcaagggcggggtcggaatcaagtcgaacgccggagttcaggataccaatagcgagcagtgcaccagccttaacctggtcttcttgcgcgtaggtgaacttgtcgatcttatccaacccatcctcgacatcacggtgtagcagcatacccagtgacgcagttgtggaaagcatgccatcatccttggtcttccacacccacgggcccttatcaccctccactagcatcatcttatcattaccaaagccggcgttaacaaacgagttgacaaaggcgctggccaagttgtgtcgtgccgagtcaagattggtgagcccggctccgcgactgctctcgagatgtgtcttgtagatatcctccggcattttggggtccagaatattgagttccttggccagggatttgaagtgcttcggaatagaagtgttattgagacaatcagccaaggcctctccctcctcatcttcggctgggaggtcgagccagatctgctgccgagcgacaaggaatgccatctgtttcttcaacgatttgtcagtcgtggcatggatgtcgctcttaataagatcaatgtcattcaaacggatagcgagcacgattgcttgcgaaagtttgttgtagcggacgtagatcccgtgggcggttcgaaggaattgctgatcttcagggtaagtgagtagattgaccatgctgaccatatacaagcagactcgagcgtatgtgttctcgtcaacgaattgagggatatcttcgatgatttccagttcgctcatgagatcaactgcatcagcttcagcgttatgactcaggaaatagggcaccagcgacaacgcaaggtccactagatcctgggtatcctggtctgcgttcaaccggttctgatactcctgtccgagttccagcgcgagatgtcggacatactcgtggccccaggagccaagatcctccgacttggccaacaggcggtatttgatggtatccagcttctcttcgtctccgcaggtcattccaagcaccgacagcatgtcagctagcgagttctagaaaaaaggatactgttagtttgtcacaaagcgatggaagcgctgcagaaccaacctgcacagggccgggggcccatttctcgtagagcgctgtcaggtcatcataatgcggtcggaggaacttgagaggcttaggaacagctgtcatggaggatgtagaagttttgataaagttcttgattgcgtccaaagcaggcccatagagcgaggtatcgggttcctatgagcaaaaaaaatgattaacgtcattgtgctatgcgcacgggacaggatagtaactgtacctttaaccgctcaacgagcatctcaagctcgcttttcaattgttgatcttcttcactgagttcctctgtgtgtagttttcgtcagcatgttgctttgagtgccaccgtggacccttgagagagaccacatgctccgttgcgagaacttggaaatgccttatcgcaacgtaccatctttagatgcctcatctttcttcttttcgtctgctggcttttcgccattttcggtgttcttgccgctcaactcgcgaacatcatcaaccttgcccttgcccttgtcggcggaggttggccgttcgccctcgttggccatttctgatggtagctggggaccaagtcggggggaaactgaaccggcgtgggagaagtaggtatcaagcaggtgagcagaagatggtgttacaaagcagagatagatgaaattctgcaagtaaagagtgatgcaagtggattgtaagctggtgatggagaagcagagctcggtctggtgcagctccgtaattagattacataatgtgccaagccctgcggaaggccctcgtcattgttttggatttacgatggctacgacttcaattctatgactcgaatccttatgactctgatttatgagggagaggatgacttaggggtattttaatatcggcttcaatttttacacccctttgtcgtacatcggaaagtgctatgtgcggtttatgcattttaccatgcttgtacacatctaaaagacatcccagaacacatgtaacgccgctaatatcattttagaccaactagataagattattaaattccacatcctcgaggatataggcctcatgagcggccgactcttcttgttatcctgagtttggtaaacgtgccggtgaaattctgattcagatcctagagatttcgctgggaattcattcttatatgcaaaataataggtctgtcgagacgtcatcaatcttgctatctctggggcatcctccgtaaagagttcggaactgcttggcatattcttccgtctgtttggtgtatgccgcagccgttgagccctctccgttgtatgaaagcagaggcaaagcatcaagatcgggaagacccgaagaaaacaagtcgagaagtggcattatagttgatgcacggttcagtggtttttcaatggagcctaagccggcgagagagccccctgtaagcggctgagcaggatcgtgaatgtcttgagtagcttcttcatccgaggttgcgggactgttgtccgcaaattcttctgggggctgatatagctcgttgtgtactgtagcaatcgaagaagattttattcctgggaatgatggatataacaggtagtatcctttggcgcggatcatctcgagcatgtattccataaaggccggatatttctccgatataatctttggttgggaggccgctgtggattgcggagtcgacaggcggttagccatgaacgaatggaattccgcccatgcatcaccaaaatacaaagctgcattactattgggggcctgccagaggaacgagggaagaaactgttctttgccttcaacggtcatgggtggcggggtgaaagattgactatcgaccgtgggtttgaatgatggcagttcaagtgagatgccgatcatattggaaaaaaggcgcttggcgcgagaagactgtttgtaattcagtacagcaaacttcaggtagtggtagaacgatggtgcgagctcggtctgtggagatagcagaagcaaatgtgtcatctcaggatcccgcggatagaacgactccacggttcgaagcgatgattcttctgtgtccatgccatggggttgaatgcgccgccgaatagtgattcggccaggaagctgggtcagcccgtccaaatgttggagaaaccgaagcaactgtaaatctacccgctggggtagttctattgtcaagcttggagccgatcctaaatagtcggctgcatccaatgacttaataagcctgatcaaagacccagaagactcggaggctgcatgcaccaccatttcgatttgtatattattccacgctattgcaggtacggtcagcatttccggacatgacataccaaagaggaggaagataacctacatcgaagagcttggctatccagtgaagctatccacataagattccttgaatcagaggaaagagcaacgtgagggacgtcacgttctcgagaaaagacctcaaccccgtcccagaaaaaggaatcctcccagtcctgaccttgtgtaatgatgagctcggggctgatgtaggcttttatgttttgcaacccccctatcacagaccgcttcatacggtcatcggtagatttgggtgcatagtccggccgagcatctgtcagttgtcgccaagtcagcaacacgcgttcgaccatcaggatctgaatatcataccgtgccatgtcatcgggcattcactatctctgattctgttgacttccttgattccgtcaatcgagacttcctccttgcccatcaaggtgaaatgcacatagttcagccgctgactagccatccgacaagctaagggcaggagatctgacacactgcggagacttgaggctgcaaacaaaactgcacggctcgtggttttctgcgaatatttatagcgaggaagagagtgggccaactcatagaatttgatcatcccatcgtaagcttcctcctttcggtccgattccgacaccttgactggcggcaaattgtccagtagtgcattgcctggcttgggaacagcagctggattgcctgagccagcccatctggcaaggctttcttctcgtagcttcgcagccgcagagtcgtaccgatctgtgacaggtcctaggtctgtcggcatgtgcttgaagaactcgtagacgaggataagtgcaatgatagcaaacaatattcggcgaggtcggggcattgctcggtgccgcagaggtaggaagcgtgcttgatcggatggtcgatggtcgtcatctttcttgcccatctcttcatcagcctgaagaggcatttttgcgcggttcatgatttcggcccggaattattaagggaaagctccgtgagctccgtgggtttctttatgacatcgaagcaacggatagatgcagaggacaattgcgaccggagtgttgcatatccattgcgaaaggaagaatgtagcggagcaatggtatccaccagcaatgacgcctgggctctcttatcgccttatcgggtcttcgccttttctccaactacgcgcatttcgcaacctaacccccacagagcaccttcctgatagctggaaatcaggatggaagacgatatgaatattgagcctatcgatcaacgcggcaccaagcgcgccgcagaggaagatgagcctctggaaccccctaaaccaaagaaaatcaaggtacagtaacgcgtgcacatgaaaccaatcatacactatcacataccagaaatactaaattccgtacaggctttggatcccgatgtcgtaaataaaattgctgctggggagattatcgttgctccaatgcacgcactgaaggagctcatcgaaaacgccgtcgatgctggctccacctcgattgaagtcctaattaaggaagggggtctgaaactactccagattactgataatggccatggcattgatgtaagccatttttaagattatagcagccggctctaacattatctagcgagacgatctccctattctctgcgagagattcactacatctaagctcaaagaattcgaagatttgacctccattggaacatacggattccgcggtgaagctctagctagtatcagtcatatcgcacatctgacggttacaacgaagactgctggatccagctgcgcctggcgagcacattacggagatggcaaattgataccggcaaagccaggccagaattccgcacccaaggcaacggctggccgagggggaactcaaattaccgtaagttaaaccgatgaaaatatggcaactttcaagttaacggagcccaaggtcgaggatctcttctataacgttcccactcgacggagagcattccgctcggcaagcgaggaatatgctaaaatccttgatgtcgttggccggtacgcagtgcattgctccggagttgctttctcatgccgcaagcacggagactccggtgtgagcatatcaactccagtcagcgcaaatactgtcgaccggatccgccagatccacggcagtgccgtggcaaacgaacttgttgaattcaaaacagaggataccaagttcggatttcacgcatccggcttcgctaccaacgccaactatcatgtcaagaagacagtaattctgcttttcataaatcaccgcgcagtagagtcaaccgctgttaagcgtgcagttgaacagacttactctgcctttttgcccaaaggcggccatcctttcgtctatcttgatctcgaggtcgagcctagccgcgtcgacgtgaatgtacacccgacaaagcgggaagtaaatttcctaaatgaagacgagatcattgaacttgtttgcgctgaaatccgatccaagctggttgaggtagattcgagtcgcacgttcctgacacaaagtctcctacctggcgtgcagacaatcgagtcactacaacgcgatcgagacgctcaaactcacgagggaacagcagaggcaacaaaagccggagcgacgcccaaaacgcccgcaacggctaagagaccctacgaaaacaacctcataagaacagactcaaaagtccgcaaaatcacggcaatgctaggcccagccgcctcacctcgcgacccatccaacccagacgcacccacagaacccaacgacccaacgacatcaattctagacaacggcctccaatacgaaacaaccgatcgccaacccctaaagatcgccctctcatccgtcaagggtctccgagccgccgtccgctccgagatgcacaacacactaaccgagatgttcgcgtcacacacatacgtcggactagtggacgaacgacgccgactcgcagcaatccaatcaggcgtgaagctatacctaatcgactacggactcgcatgccacgaattcttctaccaagtaggcctaaccgacttcggcaacttcggcgtaatccgcctagacccagcgccgaagttggtagatctactgaaaatcgccgcagaatcagaacgccaagagcacccggacagcagcaaagcggacgaggccgattccatcttcgccaatgcaccggagatgatagcgcgcacgctcatcgaccgtcgcgaaatgctgaacgagtacttctcgctgcagatcagtcccgacggagacttgctttccatcccgctgttgctgaaggggtatctgcctgcgctggcgaaactgcctcgtttcctgctgaggcttgggccgtatgtggactgggacagtgaggagggttgtttccgtacatttttgcgtgagctggctgctttttacacgcctgagcagcttccggttctgtcgcggcctgttgcgcaggacgcgctgggggagtcggttacgcaggggccggtggtagccgatgactctgaggtcgaggatgaagatgcttttgttagggcgcgtcgtgcacagatggttcgcatgttggagtatgctattttcccggctctccgtgcgcggctggttgccacgtcacggctgctgcggggtgtggttgaggttgcagatctaaaggggctatatcgggtgtttgagcgctgttgagtaataagaggatgtcgtaatgtcatacagttgtattataccgaattatatttatgaataatgaatgaatatctgtctgcttttcggcgggggatctaaaggcctgcattggtgatcgttcatatacctcatacctattgtgcgttcgacttgatattcccgtaaatcctacaaggtatcttgaaccgaatcgagagatgtgaagcctgaatgagacgaataacattaaaatggtcagcagatacgcctgtgatcaccgaaattgtgaccacaccaaccctaaataacacataacccaaagcccatagaagggaccgagagaggagaaaaaaggcgagacaaaatgataaagacaagacgacgaagagataataattcaaatggatatgaaaatgtaataagtatgttttcgaaagttccagttcaaacgtgcagcgtagcatgaagacgtaacccctagacaaggtgaggtgtatcatgagaaaatgctggtagaatgatatgaaataccagtgcaaaacctggattgctggatgaaacagcaacaaaagaaagaaaaaaagtagaaagtagaaattggaggcagaaagataaaataggccgaaatcaagaggtaaaatcaacaagatgggccggctgagaagaaagaaaatatcgggtcgaacagagacagcagaaagattgcatggatggttgttgcaatatcatgccctaaggtcttcagaacgccgagcgccaaagatcaatcaaaaggtcgtctcatgttcgtagaaatcgtgcagagtcattgtatcgtagtgtgtagtatcccgaataggtgaggtgacaacacgcattaagggagtaggtttagtgtccgggtcatcgtaaagccgagtgttgaccctaagtagtcggtagagaagtcttgtgaaatgtttaagcgttcgcgtttgcagtaggaatggcaatctcgtatccagtatccagtaagccgccctcataatcctgattgtgtagactgggggtgggtcgaggctactcttagtgcctcgaataaggcttgttgagcagagctatctcacgtgcaacaatgtcccattcaagatctcgcttgacgggctggcctcgctttttcatttgatgctcttcccattgaaggagttcataactgcagggaaatgtgagcaatctttccttgttgaatgtgagggtagaaggacagatgcttacacaaagcgaagatgtggctggatgatgacgttgagtcgtcttgcgcggacaaagcagctgttatgaattagtatcggctcggccaaacgacttaattatagattacttactatgcacgggggaaagagagatgtttggacgccatgacttcagcgatgcaaatacttgcagatcgggaaacaccgacccgacaatgaaccaatgtggccgtgccgtggcgttttccttttcctgtacacagattagcaggttgaaacagaaacggaggagtcacaaattcggaggacttacctatgaagtccaaacaacgatcgtactcctgacagagaggatcaatgccattatcttggacattgtcaatgtacatcagattgtcagctccccatttggcgcggtccgaatctgtccagttgacagcctcgccaatactaagcacacgcttgattccaagctgccacagaagctccgggttgtttgcgtgattcagattgcccagatacagatacggtaggacacggctggggaaggagccgtcgatgctgtgaaaccaatgcggatccccgatttccgagagatctgtcgactgagtcgcagggctttcctgcaagagacgttcttgaatgtggcgtaggaaagcaacgtctgtcggataggcaaagaaattgcgttgcctatcgcaatgcagtcgaagccaggcttcatgggcaggcaccccttctgcaaacataaagtacgccactgccaacagcgagctttcggtataaccgtccgcacagtggatgagaatcttgcggggtttcccgctcgatttgatcataacgacgtctccgtccggttcgaggtcttccgatgatgtttctgggtgcgcgagataatagatccatctgattgtgttgacaatgtcctcaacctctcgggtgtttcccgatgggagcacaagagatcctgatgaagggaactccaagcgctgtgaaccactctctatctgtttatcgagcatagcgaggaagcgcggaccagggatgttggccatgtcgcatgtttcgatcaataggtcgtagccctcctcctttgatgactcgagagctccagtatggaagtagtccggggtagaccctagccaaacattggacgaaatctcggaagcccgggacattgtagacatttccagtcgctcccattgggctaccaatttgttcaggttaactctgggcgtgccaaggttcgttcaaacttaccgaaatccatagtttgacctgtcggttgacctttcgcatcgatggaaatcatctctggatgttggtcggcaacgttggagaatttgtctaggagggtatatcaattgatggttcatgaatgcgggagataaggcaaagcaacgaaccggccagaatgaaggtgttgtacgtcggccgttcctctaggggatccattttcgttcgccataaccgctgcgccttggcaaactggtttgctagttcaacaagtccgctatggctatcatcatcttcagcataaataatgatatccgacatcgcagccagcttggcagtttgtatttggaaattgcggacggagaatccctcgggaggatcagccatcaagaaatgggatgaaggtgccagcacctcatgggcgcttattgcgcccctgatgcgtgctttgctcaggtcacctccaagcttcacgatggtaatgcctcgccagcatttcggagtgtgacgagcatgtcgcttgcgacttgaaaagaaacccagctgcagatggttgtctcggtgcagtccatggagccaaggaaacatcagagaggcgtcgggtaaaggttgtgatgcttgatgagcgatcgcggctgctaatttggctccgtcgatggcatacacagcgggggatgacggtcgtccaatgcgcattctttcatctggaggagacaacagcgaggaaggctgaccgctgggccgggacacggagacaggctgaggctgagatgttggaatcgggcctgtagggcatactggaatatgtctgttcgggatagggcttgatcgtcggtttatcaaggctgaggggattggagagggagggggggtcgagtggtgcagcgcctgctgctggactagcactgtggccatgacgactgactagaacgcgtggttgaaaaggggtgtaatattgtgatgaatatggttgtgtcacttgcaattgcaacacctttgagagtcgaatcaaaagacggttacatcctttgtagtcgcgatatggggaagagtacgaaagcaatggaaatctgactcgcgggtgatcgcaaccacaactacgcggcagttgttagcagaatttcctgaagcgcgtcgcgagtatgagccagtgtcgcgaactcgagcagttgcaaaacatggaaagtaaagaagaaggatgcgagttgggagggggagatcgtacaagaccagcagagataaggcaagggggtgaagaatggaaagataaaggcagtcaggcggcagggagagacttgagataaaagaagcaatgcatcaagtagaaggaggagaggagaggaatggagtggagagcaattgaaggagggggggaagataacgtgggacaagatctgacagcgagtgtacctggggccattgtacattatgtatccccagtgaattctattgtttatacatctgtaacttacatgtatgttactggatatcgtctcatcatcatcacttatcaccatcgtcatggttcccagatggtggccccaattaattgcatctgtatccacacgctccaccgccgcgggtctggatgttatccgcgtaaccttgtattaattgatggtatgatatatgcatcagatacagatcctgaacggcatgtcccctctagacagggatcctgaccacttttctctcgcgtatacttgccccccccctaaaccccacccttcaaaaacctactgggctcaaaaaaaaaagcgaccacagacaactaaccgttgatgtggccaatcactcatgaggcagaccaatgatgacgatgagatttgccgatatctccctcggaccagattatagccttgtctgtgcgtctggggagggggtttccaaggttcttctcctattctccttggttgatggggaacaaagaacttccaaggttatcaccccgctcgagaggatatcaggatccacatcggatgaaaaagccctgccaggtcgagccatttctcctgcatttcgtgtccatggaaacaggaaagtcaatttgccaatccaaaaggattccacgggcactccgtaattgatgtatatggtaaacgttctccatacacccggcagcatccacccgggcatatagtactgaatctcaattttcagatgttcccgagggtggaaacattcttgaaacatgatacatcaaatgaaaaaaagacccaacccacatattactgcttcgagacatctaaaagtacttatatccagtatcccataactagttacagggtggaacgaactaaccccggatcgccactgcgatccactcgaggtgggggacatcacaacgttagatgtaatatgcccaatagtaaacagatgcctaatcccgtcaatagcccgtcccgaaacaacacccttgatcttgtgatgggtatgcctcattgcaggtgcccaagattgggaccgggtacctaacaccgtcgcgccagtgcctaataacaagcctatgtaccatctatatgtcggcaggtatacccaggtcgcgaatgtgtcaatagcagttaagtcgtcttatcttttccctagcgtatcgctggatatttccgccataccggagaacccatgtcaactctcattggtcacctatatcttacaactcctgagccaacggccatagagaaaaagtgggctgtgtcggacggagcgctgcattgaacgatcgggcaactttctgcagatcctgcctcgattcctaccacgtctgcagatcccagctgtcctggacatcatgactaggtgcatactcccttcagtcgggttggtgagctatgtccagaaagtttacgtgtcactaggaatggaataccacctatgttaccagcgggttggtatcaatattatcagtgctgtgcctcggttaaacgcccaagtcggcaccggcaccggtatttggggatatggatactctatgcgccagtcggaacgtgcaggaactgcacatcatcgggcggaaacaaaataggctgttccttgtcttggatctgacacatgttagctgccacagacctagtgcttaccttagttgatatatctaactaatgcacatggccgtttgctacccaagtagccggttaattccatattccagtgaagccacatgataactgagtctcggtctggatagggaattatgcatattggctatggcctgcgccacattacttaggggttcactaacccgagaaagggtagacaggttgaccaactgtcttgactgctgcctatctgacttggacatagtcttgaactattaagcggaagtcgaaagcccaatttcagtcgggcggcatgaagaacgacctaatgagggttatttcggtggcccatgcacaagggactatgtcgtgcgaggcgggtagctgccgtaccttgtttccctcgcgcttgcgaggtattccttcctagtttggtacaccggtctcgattgaaattttcaagaactgaccagtcttcattagtgatacgcgacagacttagtccatgtccagggaacctggtcagtccttgccctttcccagatactgggctgcaggtgttggtgttggtgttggattattggactttaatggcaccttctgcatgggcgacatgtgactagctgagtacatcatccagcccaacagcacaaatgcctcatataatatgcgttgactgagattaacatgatcaggcttctatatttttcattggacagacggtcaccatacatcgaggctgatagacatgaattgctctcaaggtatatatatgattggaaccctattgtctgctcagggtgctcatttgttcgaaaagctcacaccagaatcgccatctacttataacaggtcattacttagagacacacaagctgagggatcctaatacaataacgaggcctttccatcgtcgggttcaatcactatatatatctgcttccacaaccacgtctaacatgtgtcgagtatatgcaacacgataggattaccctatttgctattgcatgcagagtctatgatagacgaacattgcttgtattgacaaaatagtaaaatcggtagggcttaaggatcagggtaaacgatctctacgtcacttatcgtgggggtgagtacctcgggatactctcggccgttttatggaggaaagcaaggagtcagcgaccgaaggtcatagcttcaggggaattatatatccttcttatcatcctgctggattggttcttgcgtgaaaattagccaaaatcagccagagagtgaagtagaagaaacctcggaaagagcgggcgatgactgataagacaactcggtaggcggtgggcaatcaaggtgcggcccaagcgcaaacctctcgcttgtgacgaccaaagacttcgcggatatcatatcctctcttctccacatcctcgtctttaaagtatctcgctttgttccaagtccaagacatgttacgctgtggccagtgacgggcaagagttgctggtgatcccctctcgatatcgccctaagcggggtatctccgacatctgagagttgccttatatcagtcttgatttcatctacaatcccgaacctttctaaaaaatggccatgaatttcgtgacatttaaccaggactatagctatctggctgtgggtgagtctccctccggaattgtttctatatttttgtcgttgaatgtccattgaccgcatttatagcaacatctaagggatttcagatcttcacaactgaaccctttgccaagagctatgaagccaaagaggggaacatcgctgtcattgagatgctattctcaacctcacttgtagcccttatcttatcgccaagacgcttgcagatccaaaacaccaaggtatcttgaatcgttactcattcatgtcattacaggcagtttatataaacatggaactaggaactaatctttgaaatagcgacaatgcacaatatgcgaattaacatttccaacaactgtcctcgcagtgaagctgaaccgcaagcgacttgttattgtccttgaggatcagatctatctttatgatatccagaccatgaagcttttgtccaccattgatacctcaccaaaccccaacggtacagagctcttgcgcctgtttttcccctttcattttaagtagttttttgcccagttctgacaagtcaacagcaatatgtgctcttgccccctcttcagagaattgttacatggcatatcctcttccacaaaaagcccccgcagccgcaaatacaccggcgcatgctccccctggaacgacacatgtatctcctacgaccggggatgttctaatctttgatgctgtaaagctagaagctatcaatgtcatcgaagcgcatcgctctcctctggcactcattgcgctgaatagcgatgggacattgcttgctactgcatcagataaaggaaccatcattcgtattttctcagttccagatggccacaagctgtaccagttccgacgtggttccatgccgtcacgaatttacagcatgtctttcaacaccgcatccacgctcctgtgcgtctcttcatccaccgacaccgtccacatcttcaagttggcccagcaaggaccatcgtcagatggctcttcgttgcattctcctccaggtcgggaccatggctctccaccaaatacatatgggtattcacccgaggaagacgagacgggcggggatgctggctcagattcttcctcgcggaggcacaacggcactttgatggggatgcttcgccggacctctcaaaacgtcggcggcgcagttgctgccagaatgggcggatatcttccaaagggagtcagtgagatgtgggagccagcgcgtgactttgcttggatcaaattgccgcgatcgaacccaggccctggtggaaacacaggccccgggccgctgaggagtgtggttgccatgagtagcaatactccccaagtcatggttgtcactagcgatggcaacttctacgttttcaatatcgatctttcgaagggtggagaagggaccttgacgaaacaatactcgtacgtttgaactattctcaatctcggtggatcaagtttaacgttaacactcatatcacagggttgttgattcgaccgataggctgggctacactgcggagtactgagagccaagcccctggaagacaaattaactataaggggatagatctgcccttaacggctccttgctcttcccaacgcctcttttccatgtttctctgttttcggcattggcatttactgccgccttttactatgaatcatcatcctctttttgagcctttagcgtctcaacactcccctcccgacgtttttagtcaggacttcccatctcatacatggtgtattggcgggtctacttcattttgtggctggctatatcgttatatcctctgcttccgaattcaagtcttgaatagctactttagcttctcatacttttcctattggaagaattatatgcagaaatatcttcaaacatcacaagttaagagaggggacttgttggatgaactgggaggctcaacttgatgaaggatgatatgtataagcgcgtatgtacatagaaaacaagcatcgaaagaaacgtgctcaagagtctaaaagttccggcggaatttctgaggaatgttaccaacgacaacttgaatctgctccagcttatcgagggcaatagccgcatcctcctcctcgtcatgcttgcggaaatgttcaatatcctccgggtgggtcaagtcctcctccgtggtatcgtcgccgtggaacttctcaaagtgatgaatttcgtactcatactcaaggtccccatgatgtccagggccgtaaccgagatcgggaagccggttacccgcagctagccccgccagccagtcctcccgattaataaacccagtgcgcccagtgtcgaagatctcaaacactgctcgcacggcatcttgtttcttttcttcactgacaccggcattggattcgtcgttgaggccgtatgtcttgcggacttcgtcttgtgaccatgtccccgaggaatcgtagtcgtggaggatgaagaatgagctcgggtcgaaggattcaatgtggtgttcctctagatatgacaatattagcaaggtcaacttctccattgacgcatcgccaacatgtcttacctatcatgtgtcttgtggcccaatcatctgagggcgcttcgtcatttgaatgcgagccgtgggcattggcaagtccgctcaacgcaagcagcccagctgcgagaccgaatagtttattgaccattgaatattgtaacaaaagagattcgttcaagaaaacaaaaaagtagacagatttacagtgcttggatagacattcaacggtgtcaggagatatggggtcttagctcgtttgcaatgtttgcactgatgacccgacccgagcatttgcggaatggaactttcaattaatttgctgcatcgcatgttaccccatctatttccctactcctacttccgacggggctccgggaggagtccaattgatctttagtttgcaatattaccttttggaacacattgtgcgatagcaatgccctgagaatgcagggtttgtggtcccgtactgtttcgaagcagtcgtcctgccgctgtgtcggatgtttgagcactactaccaacggggttacctcgcgggcagcaacctctagtaagagacgacttcgaattggaaactctgttaccgcattttacggcagcattttcgccggtgccgccattgccgatgcgagcgtgaaggatcgccgccgacatgactgggaggaaaagattgccgcggtcaaggccgaggtgagcgagttggtggacgaagaggagcgcattctggcgtcattacaatcacgaagagaaacacgaggactcaatcgcctaatacaagcgaggggattcggcactgtcgcttgtttccctcccggaacccaattcccaaccagcttcaacagaatacgggccttccacacagaaagaacacgtttgaacgcggccggggctcgactggtggaaaacaagccagtcgaggaggacgaacacactattgatgagcaggatgagagcgagattttccttccgcaggagacattacctagttgggtcttggaagatgatcttcgtctgaaggctattcagaaacttgctttaaggcaatttgctatccggattttgctacgaccggccatcgcacatcgttactcgggcgtctcaatgaactacgcggcggactttgagactcctcaggtaaacgtcgcgcagctcctggaggagctgaatcgtcttcgccatcggatgaacacattgaaaacaaacagacacgccacatatagcgatatcacgcaggactatgccgcgagtcaattgggcgagatgcaaagagagcgcgaggcccttgatgccgaactcaccaacgacattcgcatctacacgagccaggagatgcctctccaggaactgcttctgcggatatccaacaacatcttgagctcgagggacccggatcgaccaaccgctttccgggtcatgatcatggcatttggccagacccgccaaaatgacctggttgagctgcttctgcggacattattgccgaaccggttcttcctcaacccgtcgctcgtgatcactatcatcacattcttcagaaaatcgaaaaaccttaaggatttcgatttgttcttgaaaatgctcggcggagaaggctactccgtcaacttagggagcaggggggtttataagcaccgtacggtcaatggtatggatctcattgttccatctttaaatagcagcaatcccgtcatctatgccgccttgatagcggcggcattacgtttcgaccagcccgatcgagccgacgcttggcttcaagctgcacgtggcggaggtttctttgatagttgggaaaccctgttcacctatctacggttttacagccttcgaagggactgggataagggcgtgaacgtcttgagacgagccgtgacctacctcttgtcatcaacggaccaccgtgtagattccgtcgagagattgcttgggcgaatggtcggcctctgcgactcctgtgacaaactagatgcatcggatgcattggtaaaagctgccgtgcacagtggctttgatccaagacttatatcacgacagtcggactcaggacctttcgtccatggtgatcacaagcggtggtcgaatgctgcgaagcaaacaccgagggagaacattgaccgtcccttgtggcagaagtgctacgactttggaaacacctttggggaatacctgagccaaattgaggtgccggtagaggataccttcgcgcgacgcaatgccaaactggccgatcagcatgcagagaatgctttatttactgccctgggacgtagcagaacgccagcttccagtgagggaaagacacctgctggcaacacggcaaatgaggacatctccacactcaaaggcgaggttgcccaactccgcgaactcatctatgagcttcgcaagcaccacatctcagacccttccacgaaagactcctcccgcactccgaccagcgaagaaaccctccctccacccgccgaaaccatcacaaccatcacaacccttaaaaacccccaaccccaaactcccccactaagtcgcaatttcaccagaacttcgactaggatcagcctcgccaaatcgcaagtggcatcttcatctccgcggaaatcaagcaagcgaagcaggcggcgacaaaccagcaccgaccaaccatcattggaacgcacagctcctggtgccgagcctgcagtatttgccagctgagttgtggatcttctaaatcatggacattgactgtccgtgtactcactaaagacggaggagaatttcttgtatattaaatgactacatttgtttccaatagagcacacaggaacaccctgggcaagcagccctgaatgtattaaccacccgagggcgttggtggtgcatacaattgatttaaaattgatttaaaattgattccttgaagaacaactcatggtgaccaggcctgagcctctcgagtatattgtattttgatccagtctcccaaattagacagatttcgaagactggttgaaggcaacggccgaaaaaggattgtccgggagtaaatatggtatggagaagagggagaaagcagaaattctattcgatatattgacatcgtgatgagaaggaagcagtgcgacaaacaagcgtatcatgcgtgaattttaggctgaacagaaacaagtggtctatcgacgcttctcggcgcgcatcttctccttgcgagcgaggcgatcagcagcccgagtaagggcggagcggatgtcacccttggggaagctgttgatatcgtagtatgtaggggcgatatcctggacaacagttagtaaatctactggttataagacaggaatggggaacataccaaaagccattctggcttgacggcagtgacagtacggatgtagttcttggttgtgagaacgaattcgttatacaaaacccattcggcctcgtgggccaggacggtggacgggtgcaggagcacattctggttgtccttgatggtaaggtattggctcttgccgcctgtgtccttcttcgcgacttgcataaagaaaccggcgcaaagggcgcggcggatgttctcgtagtacttcttgtcatcgaaggcagtggagatcatctcgagatcctggcgttccatgatgcggagcagctgggagcggacattatcagcggattggagagcccgctgggagaggaagtggtcgtggcaccactgcttggggtttgcctgggcgtcactgcttcggtatgcgtggtagacgttcagcattgtcagatggtctccgtcggggtgggcaaacaggttcttcatctcatcggcacgcttgcgctgggcaggaggacgaacgaagacctgcggtacagacagaagggcggtgatggaaaggatttcattagagcagtagaattcgggagagctgatcaacataacagcaagggcagggtcgagagggaagtcggaggccagacgacccagctgagtaaggtttccatcatcatccagacaggccaaatagttcagttcttccaatgctctcatcagagtctctggcgcaggcgggtccatcaaatcgaagtggacgagatcatcaacaccaagcttcttcagttcgagcacggttgatgacaagtttgaccgcaggatctcggggtaagttgactcaatcaattccttcttgaatgcgccctcggtgtaaagacggaagcactttccgggacgtgtacgaccggcacgaccagctcgctgctgcgcggaggccttggagataggggaaacgaggagtgactcgacacgaatgcgggggttgtaaatcttttgcttggagaatccaggatccacgacgtacacaataccatcgatggtaagagatgtttcggcgatgttggtcgacacgatgaccttgcgcccggggcggccgcctggtcggcgaggaggtggtgcagggtcgaagatgcgctgttgcatgtgaggaggaagactaccgtacaaagggtagaccttgataggaccagcgtctgcctcgcgaaccatctcatctccctcaagcgcgatttttcgtgaagcatcttcaatctcttcctcaccagtcaagaaaagaagaatatctccctcaccttcagtggcgtggatttgcagcacagtccgaactgcggcctcgacgtaatcttgctcaggttcaggggtgtagaagatctcgaccgggtgggtacgaccagggactgcgagaaggggcgcgtccatgaagtaccgctggaacttttgcgcatccaaagtagccgacatgataataatcttcaagtctggccgacgcaccacaacttccttcaaaagacccatcaggatatctgtcgccatggttctctcgtgagcctcgtcaagaatgattgtgctgtagcgcgacatgttgggatcgttcatagcctctcgaagaagcataccatcagtcatgtacttcatgatggtcttcgggccggtcatgtcttcgaaacggatactgtaaccaacttcctctccaagcttgacatccatctcagccgcgacacgttgggcgacggacatggcagccactcgtcggggctgcgtacaagcaatcattttgccctgagtttgagggagatcatcgtagaggacgaattgcgggatctgcgtagtctttccggaaccagtctcaccaacaaagacaaggatctgggactgttggtagagttgtaggaactcatcactgaataaaatggtcagtatatatatttcttccggaatggctgtcgggcagcactcaccgttgcgtatggacaggcagatcgcgacgggtcttcaggattgagaaatatttgctggaaaaaggtcggccactgaaagggttgatatcgccatcttcggcctttttcgccatcgctgcggttgtctggtgtcgcttgaacttggccagggccgtgttgtcggagccattgttgttctcgtacatgtgagcgaggtaggggttgttctttgggtccccagcgtccatcttctggcgcttcgctcgcgcgcccccttcggaatcggatcggttatcagccatggtggaggtgaaagcaaaaagagtgttgaagggcaaactcgggggagagaagaagctgagataccggagaaaaaaaaatatgagataggaaggtcggccgagcgccacaactgcctatcaggctcaccgccagactattctgccgctctccacaaagggatcgataatctttgagcttgttgacgccctgtgtgtttttggctggacttctctgagccagtttgtctgatgcacgtggcttgtttgcataggactgcctgatatcaagcgtattagctcctctattgctcatcacgagcctttatccacatccctagttccagaccacccccaccattgcgctagacttctgtgtcaatatggagagctacaattcttcagaagatcccgggccagctttctgcgtcgggcaccatgagcacaacagactagttactgtgacccctcgggtcatccaaaacgtacacgagagtaatgttggttctttttcttacctgtaacattactttcataaatgctaacttgatttgatagtatgatatgatgactgttccgatcacgacctctcatttccactcgcgcgtcctagggctattgtcctcttatttggcgactctgcagtcgccaacttacgatgttgttgggaccatggctaccaccctgaacactcggcctgtggtggttccaccgctctcgaaggcagattcgtatcttaccccgaatgatgcaaccagccaattggttggtgtaaccagtagctggattgatctatgctctcctgacccgttgattgcagacttgtcccggcaagttctgatgttggaagttgcgtatgctgcgttttgcggcattggatatctgttgattcctggccctaagttgcatcacggtgccttgcattctgagggtgtcatctactatgcgcgcgcggttcaagacgctctagacctcggtccctacatccaatttcatatttggcagcagatggttgacaacccagaggctgaagttgacacaatgggcgacttggcccctcttgctcgggcagaatacctggtgccagatgagggggatccactcaaggttgatccgtttgggagttgggatgcttgggattcaatcagaaagacttgcaaataccacgcaagactgttcgttggtatgagctaatcctccctttcaatggtcatcgccattatgacaatattttgaactaaagctaatctgaatcacagccctttctttgccgaagcaactaccgtctctgtttgtgcaatcccgatggcattcggaaccagtgcgtttactgacgattgatggctcgacgttcctcaagaaccagaaaggatacccagtcttgtccaagtcacaccaaggtttgattgcaaagatgatgcgtcttcgaacggcgccatggattatcctttgtggtgttggtcctatccctggacttgagaatgtcgaagaccctgataccaacacggcttcgctatctgggtctgactatccaagtctgtcacaggctggcaagaagcaccacgaccccactccacatctctcgtatattcgcaatctgcagcagcgccaacccccgcggacagcaattgagagatttggtgtgggataccaggactacttgcaggcacctctacagccgctcacagtcaatttggagagtatcacatatgaagtgtttgaaaaggatcccatcaaatacgagtggtatgaaaaggcaatctacaaggcattgagagactgggccgaccagaagaaggccacgtctcacccggacggaaaagtgattctcgcagttgtgggagctggtcgcggcccgctagtcactcgcgccctgaaggctagcgcagatgctggagtggatattgatctttgggcggtggagaagaaccagaatgcgtttgtgttgctacagcgacacaacgacacaatttggggtggtaaagtcaccctggtccagtcagatatgcgaagttggaaaggacctctggtccgacagcagtcgactacggtcgctactggccctgtgggcgaatcccttgggatcgagagctcgttacttgagtctccgaaggatggccagcatgatcggccatcagaaatttctgaatttcaggcgtcggctatgtgccacactcatgtcgatatcattgtctcggagctgttgggctcctttgcggacaatgagctttctccagaatgtctggatggtgtgaacgatgtgatcaaccccgtccacggcatttccattccagcctcgtattcggcacatttcactccgatctccgctcccaaactgcacgcggatgttgtgcaccagacggtgtccaacccggccgccccagagaccccatatgtcgtgatgcttcatgctattgacttcctctccactaccgagacgcctcctagcgctgaaagctccaaccccaataatggaaaccgggcatccaccccgtcgtcgtcattctctactactgaattccccactccctttgtgcagaccgcatggtctttctctcacccgaaccgacacattcctcctcagtcccccatgcagtcgaccatctccaacgcccataatgtgcgccaaacacgtctggctttcccttgccagaaccgaggcgtgtgccacggtctggcgggctactttgaaacagtgctctacggtgatgtggagttgtcaaccaacccggtgaccatggatgccaagagcgcaagcatgatcagctggttccccatctacttccccttgaaggttagtatttttgaaaccttccaactaaacccctcgcttctgtccttcccatcatactgacaacgctctcaagacccctcttagtgttcccgagaacggtgagatcgttgccacgatgtaccgtcaaaccgatgaccgcaaggtctggtatgaatggatggttgaggtttatgcccttgaacctactggggcattcgcaaaacccacccccgtgagctatgcgcaagctgggtccgtcagcgtggaaagcctgaaagctaaggaaaatgccgcgaagaagacccaccgcaccggctatcgccgcgtgcgagtgggaatgagtgatttgcactctagcatcaaggatggctgcttaatgtgaaatttataagccggggttgaataaaagctgttcgagccatgagctccactattgttaacgattactatcacgattgcagttgaattttgccgtttgagaccgtcaaatctgatcatgcgaacaacgctaagcactttgttctagaggttcttgccaagtaaagtacggagtcaccttgcatgtcttggcagggacccgattttaatcaaactaacttcgggctgagctgagcagttcagccctggctgaggctggaagcttccgatctgtagattttcatgtgagataaacatatgtcacgcactccctatattaatgtgattgtatagagtactccttacttggagtacacctggtttcgggttcggcgttgccttacttaaagcacacgcgatctcagattctgcattgccttaatcgccggactgaccggaatgaaataattccccggctccaccaatgcctccaaatttgatctatttcgtcgatcattgtgtggaactgtgctgaattccctcgtcacggagactagtatcgtatttttatcatatgccgttgtttattggttcccccgacaggaaatggcttgcgcaagtgtggaacccattcaggaacatactgtatgaatttgccaggggggatcgaacatataaagccgtgggtccccctggcctcaattaggcaccgcgattgacaacaagccatcatgcgtttctctttattcacagcgctatctgcagcagcatcgttgggtcatgccctccccggtcaactgcaagctcgaggtaccatgccacaaacattgatcagtgcatcttgaccacctcgctcacacccggttagatgtttcgactagcgaactgaaccagttcgacttctgggtccagtatgccgccgcggcatactatgccgatgactacacagctcaagtgggcgccaagatcagttgttcgaaaggaaactgcccccaagtggaggaagctggtgcgactgtattctatgacttctccaagtaagcgacgtccccgatacaatacccgacaaaacaatttacttacacatgcacagcgccaccatcacagatacttccggcttcatcgcagtagaccacgccaacgaggcagtcgttctctccttccgcggatcctactcagtgcgcaactgggtcagcgatgccatattcgtatacacaaaccctgatctctgtgatggatgcctcgccgacctcggcttctggggctcctgggtgcttgtccgcgacgacatcatcaaagaactgaaagaagccgtctcccagaaccccggttacgagctggccgtagtgggccacagtctcggtgccgctgtcgcaacccttgcggtggctgatctccggggcaaaggctacccgtcggctaagctgtatgcgtatgcctcgcctcgggtggcgaacgtgcctttggctaagcatatcacggctcaggggaacaactaccgcttcactcacaccgatgacccggtgcctaagctgccgttgctggccatgggctatgttcatatcagccctgagtattggatcacctcgcctaacaatgtgactgtcggtgcttctgatatcaaggttattgacggagatatctcatttgctggaaacactggaactggtctcccatcattggaggatttcgaggcgcataagtggtactttatgaagactgatgcaggaaagaatgatgggaggccgttcaagagggtttgattttcttgtcgaattttgtttaatagattctagaattgctggctgacattaatatgtataataaagaataataatggatataatttccgagttatgcaaggccactgggcagaatgtggtctgagatgtggaattgtgtagaccgaggctatcaatatgatccccaaaacccaactaagcactaataagcttgaatgataaccaattcgcctatttccgggcttcagaggacgtcgagtcggagatccgtcggctttagaccaaaaagaccaaactgggcgatcttagtagtttctggccgtcccgtttgatcctagcaatgtaaagtggatatctcctgccgagcggggttatctggaatcaatggtataagatatggctcgaatctcggatttgattggggatgtccattcaaaatggtgctatatccgaaggttttgttggcagtgctggtaagctatgccacggcacaatttgtgcccgcacctaccgacttgatcaccaagaaaggacacgccggcatcgatgtgcgatataaggaagtgcctcctgggatttgtgaacaagaccccagtgtgaagagttattctggttacgctgatgttggtgaggacgagcatattttctggtaagcattcgcgatagggatgagccccagacatcgactgactagcgcaggtggttcttcgaggctagaaacggagatcctaaagatgtatgtccccacggcgtttgagcattgatcatgtgcactaacaataaacaaggcacctcttacagtttggatcaatggaggcccgggatcatcgtccatgatcgggctattccaggagctaggcccctgtggagttgatcacgacggaaatgtatacaacaacccttattcttggagcaacgtgagcaatatggtaagtttgcactgtctttgttcgccgggactctagctcaacttgtcactagctcttcgttgaccagcctgccacggttggactatcatatacaatcccgattccagcctacgaggatgacgatggcaatgttatccagttgcccagcgaggagtgccccgattatgcccaggaccttgggacatgcggcacatactccaagccagacattgccctagtccctaatacaactgcacgtgcggccccaaatatgtggaagacactacaaggattcatgggagctttcccaaagtactcgagaaatggcttcaacttcgccactgagagctacggggggcactatggcccagtcttcaacggtaaagatcgcaaacacttctaaatgcgactggcgctaatttcagctcagagtactttgtcaaacaaaacgcaaaaaagccccatggctcgattcggatcgatcttgagaacgtccttattggaaatggctggttcgatccgctgattcaataccaggcgtactacaacttctctatcttcccgggaaacacttatgactacaacccgtacaacgagtcggtgcaggccgaatggtacaacaatctttatggagaaggtaactgcgtcgatcggactcgggaatgttacgcgacgggtcgaaacgatatttgctctgcggcggacgacttctgcgcttcgaaggttgagtcgctctttgatatctactcagggcgcgacgagtatgatatgcgagagttgacacccgatccgttcccatacgaattctacgtcgattatctcaacagccccaaggttcaagccgctattggagcataccagaatttctcggagttctccgggactgtgggcaatgccttcggaagcacaggcgacgacgaccgcgagtctgcgacgatagagaatgtgaggaagttgttggaagctggagtacaggtattgctgtatttcggggatgcgtgagatctcccacatgatgagatgactagcctatgctaattcgagttctagcgacttcaactgcaattggctcggtggacaagttgtggctgaggagatcaatgccccagggtataatcacgcaggtttcgtgaacatcaccacctcggacggcgttgttcatggacaagttcgtcaaagtgacttgtttagctttgtgcgaatttacgagtccggtcacgaagtacctttctaccagccattggctgcgttagaggtgtttgagagagtgcttttgagaaaggacattgcaacgggtagccaccatttgaagccacacggcggttatcgaactcatggaaccccgacaagtgactaccgagaggggaacagtacagtgattctggaagtgctggatagcaatacgacctataacacaactctcaatggaccgaacccatctagctcggcttcggtcagattacgcagccgacggttgagaagtgtttgaacagtgtacttgtgacgcaactgcgtttttttgtgagatatgttccatttcaaagattcaaattagaagacaaatggtatggtgaagccatattttccatgtccgagtatatcgacgccgcagtgaaacaattcccagattacattcctccattcgattcattccgttctctctcttgggaagtctcagttcaaggcgacatgatgacacaagtagcgatctactcggtcaggtcagcagtgtcggcagtgtcggcagggtcagcgtcgctggacttctcgtcctgagcccgctcaggcacagacttggtggtggtcttgcgacgcttgggagctttatccgccttcctggaggatgtgtctttggccacgccacgcttggtaccagaacgggacttcttagttggtccaccgttggtgtcctcatccttggaattgacagcctgggtaggagactgcactttcaaaccaagaatttcctcaaggtggtgcttagcacgccagtagttggtattggcggatgtcttcttcatactagcgagagtggcaagcttctcggagtcaatctatgaagtaaatgttattagacagaaataggaggcatgatgtgagtctggatactgaccttgccatcgtggcataaagaaccataaatgagcagtcgaacatcagctgccttgagctcggagagcttgtcatcaagcttgatagaggaagtcattttgttaaacttgtcgattggataagtgagcgatgagtcaaaccggtgataatgaacgaaagtggatggatgagaagcgataaagaaacggtgagggaacaacgatttcagagaaccaagaagagagaagcatgcagaggaacaaattcaaaataagagcgtgccagatgtgatgatcggcgagaagatgtactacctattagaaatgtatcgttgtttcggttactgattcttgcaatctagggcatgatatagcttgaacgtttctaatgtttaacgcctggtatgaaacataaattagcatatattatgatatttatcatctacgcacactcacggaactaagggatacttaggaccaagacccggagttctgtgataatatggatatggattttacagactgtacaacaaattgagggctagagttcagggcaaataggaattatactaaatgggtatacaagtaagatagcaatcagcttacttgggggccctcttatacttcgaatttcactagtagtattcactaaatcacagtttcgagattgtatgctgcatgaaaaagagttgcttcatgtgagctcctatcaagataccaattcatttgcccaacttgcagtatatcttgcgaaactatgtagctttctttgatcttagtgatcagtttataagttccgatggtgaaggtgatcctttatgtggctgtgccaactacgctgccctgcgaactgccctgcaagcctaagccacatcagccacaccagatatataaacctccagtaccccttcagggaatatgtgtttgactcatcatatgaaaaccatcctagatttccgataatatattcaccagtctaatatacctcgctagtctacaacttactcgccacagctattcacgcctttcgatgtgcccaatacaagaatcggccaagagaaaggagactttaaatcctccacggctttcctcagtcagtgcttagaattgctcctacaacattgcatgctaatttgtcttgtctggttataggttattgaagatctcgacactatccagcctcagacacgccatgttgatgaggcgctggaaaaaagtcgggactattggtatcgcctgacatcactagctcatgcctatcgggatcatggcttgaatccagattacacaaaccctcgccacattcttcatagaattccaaaactgcatgtacgacccgaaacaacctatgcccgcccttacggagtttctcctcttgttctttgcatgcaagcatcctcgacttggaaattagtaggaaactcggattgcgacagcattgcgaaagaaaggacagccgatgctatgctcaaggtcggcactagtgttgctattccctatagtttcgaagggaatgccttcaattcttggattggcacaacggaagaaaaaacacactagtccaaactacttggggatcctgacaattggatggtgttatgtactctctgcacgatttgttgaaattcaaggcgagggtgctactatgcaatatacagcctcttagatcgaaaactacgatgaagactcttgcgacctgccggagactgatataatcgattttagggcagcagatgaaaatataacttggtggtggtatgcaatactagctcaacgagaagggtggaaagccattatcaaacgaacccaccgccacgaatttctcgccccgtgggcggtgtcacagacatgcaatacacgtttcgctatcaatcagaagggactctcgccaacctcctcatatacacccttaacctcagggaaagcttttgatgttctagctgggtttgtacagttccataacctgggtagccaacttcctatcgcgcctatgacagccataacgctcccaacacatgaatactatggctcgactgtctaacttccctttccaagagcatctggtggtcaacaacctacgactcccatggatgttattccatcactttggtccagtttatacgaggagctgccctactacatgactctgagctgtagtccggaagtagtgctatctactctttgtggatcattcggcgagcccgaagtcccatgcaatctcgtcgctccctggctgcatccgcttttcgaagagatactagctgagacatctcccacgggtagccacgattacgaagcacttgttctaatcggtgcaatacatcgacctaatataggtgctctttggattgtagcggttgccggcgggctaaccccaaaaattattcaaaaagtaagaaaaggcacgtctcctattaatgcacttggatttccctggactggctgtcttcaaagcttcattaatattccaggttcgggtccatacacgcatgggaaccctgagcatatctcaaggctagacgtatggcgcttactgcatcctccccaaatcgaggatgacgagctgttgtataaaaccaggcctcaaacaccttgggcaccctgggggtcgtgcttaccaaaggattgtgcccttcgagttactacacatttgaaatgcgctcgacatgagtaccaataccaccattggaattggcacttagaagaaggctcggttattcaggatcaggggttttcaatagcacccctttcgacggttacagaatgtccttccgatatgattggtattagggagcaaagaaggttccctacgagggaacttgatcaagaggcttccgaagaagccacactgtatgccttcctttggtttggcatcaacggagagggtaaaccgtcggaaactatatatgaagatgcctggctcgagggcatttgggaggaagatgaatatgattgggaagacgaggctgacgatcaagattcgaaagagcctgttggtcaacttgaagaccgagtgaaagcctggctgaattcagtcggctgaccaaattgcagtctttcaaatatggcctttattcctttattgaatatattcaccagccaaggtgcacatctaacttcttgccagacccccaactctagcgtaatgagtaagcttctgcaactgactgataggtgcacagagacaatacataagggcgagcgataaaatgtcaatacacactagagaaacaacgcctatcctagaagtagcggtcagatgcctttcccaacaatgttactgataagataagatcaccagatgccctttttagaataccaagaaaaagcaaatatgtatagtgtcaccattttcaagaaagcggtgtgataataggctgtaggcgctgttgggtggcgcaataaggcgcttcgcccggttgccgcttcgaggccaccgaaaccagcctcatgcaagggatgtcacaaacggcgcgtatagaattcgagtaatcaaaatccgccaagtcatagtatcatggtgcaataccatgaccttgggagggtcgttcgtacatctaatcgatagatccaacctacaaggctgcacgcattccagatcataacggggctatttcccagtgctaacacgtggaggagctctttgcgcagaccatgttgtacatcaatgtagagactatgaatacaagtattcaaagacttggggaatctttgtctagattctaatgggtaccgtaataatgtgattatttacaagacaacctcacgaggcaccgagatcgcgatttgtgaataacgtgcaggtagtgcgtattattatgtagagtctttaatgaaggagttcaaattaagttaaatccaatttgtctcatattaacgcattgtcatggtatcatatcggctgaagggagagagaaagacgctaaagcaaatgaaaagcccaaactaagcgtatcaatcgctaatataaataattctcaacggtcgtcggacgggtggttcatctgcactggatgatcctcgtactgcaagtggtgggtgggaggccacgaatagagcggtagttggtcctgaaataattatcagcctttgtgttcttgctggaaacggatttagattgcactcactaggctctcaatctttgccaacgtaggatcgatatcaatatcagagctccaaatcgaggggtccgtctgctggtagggtgacgcaaaggcttcaggcttcaagatgctccggaggtattgatcgatggcagtcaccgtctctaccggcatgcccgaagtgggatattgaggattcaaaagggattcgcttgcgacgggtgagctgcatatatcggtcgtataggaatagggggatgggtggtcgtgagcggatgcggaagattggctctggccgctggaatactgtgggtatggcattgatgaatccatgattccccatatcccgggataactgtcggtgctatccacttggaatggaatagcaggcgatttggctggttgcgactgcgtctgttgttgcaggctcgactgtcgagatgatctgtcactgtgggcgtatggtatgttttcctttggtgctgaagtcgcactttcattcaggtcagtccacggcttcgattattgtcaactgctggggggttactcactgctggaccaaatgctgggtcaagtaatctggacgatggtatgtctttttgcacccttcgtaagtgcaagggtattgctttttaggatcatggctgagctcatgtcgtctgcggtgttcagctctggtaaagacctgtgtcatggcggtaagcgagatgattcattggcaatattagaatggtacttaccttcgaacatccagggcgctggcacgcatggactcgcttgcccttcatagccttgctcacccggtgagagttttcttgtgggggcgaagaaacatcaacgagaggtctgggataattcaccgtttggcttgcgttgttattgtggttggccaatgttgagggcgtgggagtaggatatccaaagccgaatggcggcgtaatggaggcagtagatgtggtgttgaaggacatattgtaggaaagaaaataagctcttatatggccaatgcggctcaatatgccacccaggacgaagtggcacgtttagacgttgtggaagtcgtacgagctcgagtggggagatgaaagaaaggtaaaagaaaggtatatgggaaagggggttaataagacttttattaatgccaacaggtcaacagctcgatgggtgggtgtgtcggacggtctcggtcgtattggatgccgatctggtgcctaatccaaggttataggtacatgggaaagtcgttttcgaaattaagcgcttccccgtctttttccaccgtgtacctaagaaggaggaggagatatccataaaaatgatatttcagaagacggttgaaaaaaaaccgaaaaaaccaacgcgatgacaagtccgcataatcagcctgctattcttgttaagaaaacaattaagaaccaagctaatactaaatagtccgtaaagaaaaagtctgaaacgactcagagcacgcctagtgattataactttcacctagcggggatcttttggggccaaaagcggctgaagcgacgttcggtgatttccgataatgacgggcatcacccccagtcaacaatcagagcctcaatctcctggatcggtcgctcacgtagctgagctggacatctctacaaattcatcttattgggttgtgatatgccccactaggtgtggatcattgcgatgtagagcaagcggcatgacatgttacaacaacccggcaggctgagtcgaaattcaaaccaaccaacacagaagtatatatgtgattggctcaagtacactctggtctaaaaaaaggaaaaaggaaaggtgcgagtcgacgtatacccgaatggttttgattgaagaggctcaacacgccagagacccactttttccacttggcgtcgattctggccaatagaacgtcggtattgtatccacctgggcaccgatccagtctccagtccgaccttgggcacacgggtggcttctatcactctactttatatgcacttacggacttgatgcagcgtaggcgcattgtcgcatgtcactttggaatgagacccggggagatctagctttggagtgttacatcgggaagctgcggtcttagtacgtggggttcgtacgtggggtatggtgggggctaaagcatattcccggcaaaattatttggactcgggaaatagtatcttgaacttttagtcgggtgtgccttgccaattgagaagcgggtcaaaggcttcaagtggtggtcagtgcacatgatacttacagttggccgttcgtcctgttgaatattcatttagacgggatattaagtagtgatttcattagccatgggaactgcgggggcaatcgagagagtgaggatagcacatcaattggactagcttattgcattttattgagacgctactcaggtcgctgactgatcaggcgctccggggttcaattctactcagtgatcaaaaagcggcgagggatgagtactgaaacgaaaagggaagaccaggaaattgcatagatcgctttgatatcaaattaaccagagtaatgcatcttcggactaagttcgttttccccatttcttcgcatgtaaatctgtcaaggcccaatttgcagagagataatcaatgggcgaatcggaaatccagtcgcttatttccttcgtccttagtagtcgccaaatagttcgtcttttcgttgtccgtcatagcgttccatttcttgtcccggctttgattgcgccagacatagtataccttggtcaacaagtatatgaacacgttggaaacaacgagtcccaccagagtaccattgcctctccggtagcggggagcatcatctgatccaaattagaataccgagcaaatgtaaaaaagatgaggaatttcatgacctaccagcgcgatagatattggaagcaataatccccgacgattggacacacatgttatacatggcagccgagaccgtgcgggatcggacagtgtttgagttgcgggagttccagttgacttgaatagcatgcgctgtgattttgtgagccatgatttcaagcagatttgaacaggtgagcttaccatttggatatgacaatagcagagttatcaccgcccacacgcaccacttgttcgcggtgttgatgtcgatcacatataaatagaccaagaaaggaagcatccatatttgcccgatcgtagacaccaaagtcaattggttacaaatctccgatgcatatgtgaggagtaggaggaagataatagacagcacttcgctaggaatgaccaagagatttgtcacgaaagtgccgaatccgaggcctttcagagtcagagttaggtattgcttggggggcaccactggtgtttggaaggtaagtccgatgatgtataacggccagagatcatagtccttgagacttttccagagtagtttaggtgtaataggttctcgattgtgcatggttcctttgcttgggtcatcacgaattactcgattgacgatgatggtttcctctctgtcaatcctgtcaataacgatccggtttgctataagaagggagataacttaccgggcagtgaaccaacccgatttaccccgagaccaattagcagtctggcatggtcctggtggcatcaggatatatgcagatagaccaaatagaagtgtcagaaggccctgtcttcgatgtgagtaatgcgccgattgcaatcaaatttaaatgaggtggctactcacctccagcaaaaacagccagcgccatcccgattgaccttgcacaccacgaagatgtaaaaatccgaatgcgaggaatgcagcaagaatatccgcaatattcatggccgtccaaaagaaaccgagtcgtaaagacagctcatggtgtttataaaagtaggacagatacaatatcacctttgagtctgttagcagtgacccgtaaccagaacacgaataacctacatctgggataaacccgccttgcaaaatacccagcagggcgcggcacaagaggaaagtcgttctcccattcagaccatactgtgccatggcaactgcagaccaaagaaccatttgggtgggaatccaccgatcaggtccaacccatttgctgacgagctgagagggaagctcggcactgaggaatgagagcttgaacaccgtatttccaagattgtagtctggagatagaaattattattgtcagccctagaatatcataagataaaaagataactccgatgctttatttaccatttgtggtcatgttcaactcgggaagcatgttgtcggttagagcttgtgacagattcgaccgatccaactccaagcacatgaacatgagacacgcaaataccatgatacggagatcgatttttcggatcaatttgtattcctcgttccatgtccaccgagccgaggtgtcaaatcggtgaagattctcccagtcggctcgaggttgatattccttcgcggtgtccgggttgtcaaaaacggacggctgagtcgcaattgcttcggggttgtagtctttgcctcgctgaaaccaaaaccgacgttcatctcctggctcacccaacggcgggatgtcaagactggtagatgagtctgtatctgtccctttgagtactgttatagactcatccgggcctttctttgtgctgtatacagtggacatcttgacaatccaaagccaatgtgggtgaattgtcagaataatggaacctgtcgttctacctttaataaatttggattatctggactccttttatacatccctgcagcgacgatccaatcggggtatattgccttgaacatgaatttgctgataagagaccacttgaaactggcttgcatcatgaagccaagtatggaacaattcttctggtgtgttgtgagaggttcgggttcagggccaagaaaggtcaagagggttagtgggaatggcatcttgatggctgaatatcacatcattctgtcgaaaaaccacatcttgcccagtctaaaagcaaactagaattatgttcaaatcagctactgaggtccattgaacagctgcgtttaccgagaaagacaaattgccaaataccttgagattattttgtttctctgcaaaactactcatcggtgaacggcaccacaaatagaacatatatctcatattgatcgcagcgtggaagcctgagaccagttataaggcaggaccttatccattgtagctacttcatgatgtcgtttcatcgatgatgcgaattggaaccctcaggagcgatttcaagcgatattgacagaccaatcaatctacgcgtctaagatggacagcaagtccggaaagcgtgattttgcctttcttagtcttggtatcgtctgtattatccacttcgatcctaccgtccttggggtggcaagcttcatattattcgaaatttggtgggcgccctataataaaaatgggggacagggcaaatctcatcctttaatctcagaagaatcatgatagaagaactctcgacgtatatttacttaggggtccatttgagtatgacttcgcttttcaccaagtctaccttatggtgtcattggcccagtccgtcgtcttcggaggtagccatacgtcctcggctttttgattttcataacaattgagagaacgccaggtaaagactataacattgcggatctataaagctacggaaaggcttcaagaaatctaccgcggatcgcttttcgtgactcaagatctagctcccagaattcttctgcgcttagaaactccctggggacttagaccacatacgtgacataacctccggtcgatattatcttcgccttgctttccatcttgataagcaaggcaatcggggataacatcgcattccaatctcttgagcgctttcagggtcgtcaattcaacgtgcgactgtggcttagaagcctgatttcgtcgaatctgagggctctgatattgagtgccaataacaaaaatttgaagatagattttccttgcgatggccaataaacttagcagttgtgaacggaagtccaaggtcaccggtaacatcctgctgcgtcgtcaattgagatcgtccagagagcttattactatcgatggcccaggtttggcggggcaggtggagaggcggctcggatggtgggtggatcgagagtgacgtccgtgccttcgaggccgcacaggaacgaagcggttttgggaatgttcatgctggcttgatgagttttggaacgatggacatattcttttggcgaatgaaagcctagtagagctggcgtttggataggagtaaagaagacgagagttgttgatgggaaaaatgatcatccactaaccggccccctgaaatttttcgagtaatcactgagcgagcagcgagccaatcatgctctctgatttctcagtgagcggtcatttggcatctctgatatgtcacctgttggagctgagcaggttactcggctgtcctgaccctgagcgccctcatgaagcggcagctaagaaaggaaagccccggcagaggaaagattgtacgaagaggtcccgaggtacatagtccgtcggctaagcgttggtgacttccctttttgttgcgatgggccggaccctatgtacatggcgtgcttgagtgcggagtagatgtgcatatgtacatccagccaacaaatagtgaaggaaaataatctagaagtccaactagttatttcggattgatcagattcagcacatcttccggctttaactgctgtaggaatagtgtcgtttgtaatcaagattctactatgttgcaacctctagtagatatgatcccatcacggtgacatttccagatggcggcatgtcagacaattcctgggggaaatgacgaatatcaactgtgacagcacaagttgactgttatctatcaagaagatcaacatctaagacgtgctttcgctctaactgtgcgacagcaatgttccagaactgcggggctacgataatgagggctgggcaccgcagcagacagatgtcgcaagcggataatcggcaatacccagtatgtcacggagtataagattgatacctggtcccagctttcatcttctagcatcaagcaacgctatccaacaactgctgtatccaacacccttaccatggcatccgctgtcacccaaaccgcacctacggtggttcccgttgtggaggataagattacgctcacgggtctcgcacgtgaacctctcaagtccagcggaactctcgatgctttcgaatactttgatgtcactccagtcattgggcgcgaattcccaaatgccaacttgaaggacttcctgcgcgcccccaattccgatgatctgcttagggatcttgccctaaccagtaagtcgcatccgtggctatgcgtgacagatagagctgacatgatatcccagtctcgcaacgaggagtggtattcttccggaagcaagatggtctagacaatgacctgcaaaaggagcttgtccaacgacttggtgaactctcaggcaagccaagcacatctggactgcatatccacccagtagcaaactcgggtcgggaacacagcgtcaaggacgatgagattagtgtgatcagctccgcaagccgggaaaagctgtacgaaaccagaaacaaacggaaacagactgcgcgcagagagtggcacagtgacatcacctttgagcccattcctagtgattatactctcttgcgtcttaccgagcttccgaaaaccggtggtggtaagacctcattgcgtcctctctatgagatagtccagggacactaatcctcttctagacacattgtgggcctcaggatacgaggtttacgatcgcatctccgaaccataccagaaattcctggagagcttgaccgcaacctatgcgcaacccggcttcaacgaagttgccaagcgcaacaatttcacaattcaccttggtcctcgtggtgcaccggaaaacgtcggagaagatctcattgctgagcaccctgtcatccgtaccaaccctgtcaccggttggaagagtgtctttgcagtcggtacgcacgtgcagaaggtcaacggtgtctccgaagaggagagccgccatcttctcgactggtttgtatctctcattgttgagaaccacgacctgcaggtgcgcaatcgctggcagaaccctaacgatctcggtatgaccccccggtgaaattttgtgatggccgtatctgactgttggtatagctatttgggataaccgatcggtataccacgcagcgacttgggattatgacggtctcggtccacgcactggacatcgtactgttgggctcggagagaggccatatctggaccccaagagcattggaagacgggaggcactctccaagagcgaataggtatttttataatccgcattggaagatcggccttctcgccatgcaatttaaatgaaactcttgttcttgaacacgattcatatgtgcgacacatagtatccaatgtctacatgcatttcctcaaaaggttattccttgggacaatccacccatgggtccatttcaggccttgagacgcggtgacctcagtttcctagtacgttaatatttaatttcctgacctcgcgaacaacttgataaaatggcggatgaagttagaaaggagttcggagctagaaaatccccgatcatagcaagattctttacacaaattcaatcaaaaatccaaatatagaaggcaataaaagagctgtgctgaagccatatcagtttatgtacatcaagccggctgggagctgacaggtgaccataccatgcaaacagagactattcccagggctacataggaggtaaatcaccaaaagacaagtttgggtcccggattctagaacccttcggaataatactttctcccagcactctcatgttttctatccgtaccctccggggggaagtcacgtaaatatgggccttggtacctcctgggttgaggaagagtgagcaatggcatggatctggctttgtctcgccacttcctgtcacggtggttgaatcgtagcccctgtagaataattaggatactttatggatgtgatcgagcctaggatttaatatggcctcatacaagatgcggacagaggttttccctatccttcgagcacatgcgacagccacttgctcggtggcactcttcaatacattcaattccgcctggtaggttgcagcgcttccaggtaggttgaaaattgcgtttgggctccaaaagaaactgataccgtcaagggtacccgaataggactcggcggggatggtgttctgaagagacatggtagaggtgagaatattaacgagataaaatgccttaggtcttttggatgtgaaaacagagagtcaagattgatggttcctcttggatgatgtctccaacgcctatatatatatatatatatatatgtagaaagtctagccagcaggggccattgaggtcaaagataaaccccgctactttccctcttagagatacgttgcatagccaatggatacgcgccgtacttgaagatcatcatgtcagagctatcagagagcttttgctttccaatcagtttagtcgcacggtactacaaagtacaagtgtttcatatctcaagaattaatcattcaaatcccagagcattagtcttattgggtatagcttgttttcgcgtgctgctttgatagtgcaattatgctcgtaagcgctaggacaggacaggcccgagtttatttctgtcagtacgtatgtattgctacatcgtaatctatttttatcttgttttatcttattttaatttgatctcattaggtttccttttgactgggggcggatcggcatcgcatggctgcgagtaacttttctctgcgactgttcgttggagaacatagtattcgccccatttgcgattcaactttcatttcaacgttgtctccgattaatgaaagggttctctaaacgcccaagaatgtaaatgtgattgttagggtttcaagtctcaagaaaaggtcgatttaaaattacacaatccctgggaccacgaccattttgaatctgaagaaaaaaacctcactattaaaccgattgctcgccgacctcgggagcattgaatcgtgtcattggttgtcccttaagactgtcaagagaatcatcatgtttcagcgaagcgccactagttctcacaagtacgaacagaagcggcaggaattaaaatagacagcggtgatcctgggcccaagcgagtggtgacatccagaaagaagggattttgggctcagcgcatgaagttgataatttgcaggagccaactatcactgggcggtgtgacgaattggcacttatacaacctgatctccttctgccttaagactcacctaatcttcttcattattcatctactctgccatcgacacattcatctgaaatggccaatactgaagcttcccctgaaaacacgacagattttggtgactttgtgaaggatgaagaagaggaacttgatctcgaagagcttgttgagccatggtataggtacgacacagaggataaccaacatttcctctatcctattcaccttggagaagtgctcaacgacaggtacctggttgaacataaacttggctttggtggtggctcaaccgtctggatggcatttgacctacaagacaagagaaacgtggcccttaaagtcatggccctagggcaatggggcgacaatgaaactcgaatccaggatgagatcatcaaaacagtacaggatacttctcgcctggttatatatactgcgactttctttctaccccgagacgataaaagttgccatagggtcttggtgttccctgtgaaagggccatccatctgtactcttaccttgcaaaagattcccatggcctctcgcatgtttgctgctcggcaattactagggactgtggcaagcttacaccaagctggaatcatacatcgcggtgagtcgacattctcttgtttgattttcttttatactgagaaaaatgttatagatttgaatgcaaggaactgtatgtggggaatagctcctttcgatgatcttagcagaagcgctaagtatgaattactcggtcggcctttgaagcaaacaataccatttgtcgatctgtggaaaaagggcgagcttgtgagccctatcaaatttcccgaagaccgtcgcacagatgaattctatctctgtgattttggtttagcaaagaaagtaggcgatctcactagccaacgtggctacccacctatgcattattgctctccagatcgacttcataagcaagagccaagttttgcttgcgacatgtggagctatatggctgttttctctatgctctaccttgaatttcctccgtttcccacatttatcgaaggtggagttgtgagtggtatggttgaatgcttaggcccactacctaagcagtggaaaggtctctacaaatactccgacggccttgactcatggtatgatcagtctcagtctcctgatctagagcatgaccttgctgcgaaaattgcttatttccgtcccgattctgatccggtcgagcggcagcatgtgctttcggtcatgtcgaaagtatttatctacgacccagaaaagcggctgaccgcagtagaacttttgcgagatccttcattcagagccatcatggaccggtacaagtgctgagactcgagcactcgaagagcatttgcattttctagccacggagcgcaagaaataatctgcctggattgaaatagcttgagtcaagagcgggacgtgatgagcaaacaggtgtcaagctaaaaaccctcgtactgctgtcccgttagctgccaccgaagtcaagccgggatccctcgcgagtcctgcgatgcaatcggggccacctttgtctcagctatctaaacactgtcgctccaagaatacctgagtatctatggtctcgtttatgataacgataatcagcacgtgggctatctcatatttgtttccacggacaatgccgccaagactaagcgtgccgagcgcaagggtaatagcgcgaatcactactcgatacatgaaaagaccaggggaaaaagcatcaaagtacaacataatactattatctgaggcgcctcggtccaatctttagtacgactgttttacccagtgccgttaccgttctggctcctctcaatctcttctcttcctgggttctcccttcaacggtagacatgcgctgtagtaatttgctgtgtttatctaaaaggagtaatcttttgttcaatcacatcccgacccaccatataagttttggctacttttatgtatacatgagcttgatcaagttttatacaatccaacctccgaagacgtcggataagacgatcttatcatagaaactcccgcggggtcttattggctgataagcacctttctcgctggctgttgcctcgtttaagataagcataaagcatgccactcccaagtccacatataaatgtctggtgagcccgacgaagtaacacaaaccgattttaaattcattatccagacacagaacataatgcatcttgctattcctcccactcctattcgcaatcccgaaaagggcttcaagacacaccctaagaagacacgaactgagtctatctcagcaattgagaccgaatctgcacaaccctcttccgatggctcgtcagaaaagtcccttcggtccattatcaaaggtgagttatgtatgacttatttttctaccttcgcttacagtattatagcctttgtttctcgcaccagaatgtgaagacggcggtatctggcagaccaaacatggtctttgattgatttactttcttttgttatatatctggcctctcatataccttattcccctctcgctcttgtggacttctcattggtgtgtgttttacaagtaattactatactcctatcatactcgttgagcctttttatcacaattcagtgcatgacctactcctacttaccaaagaccgggtatgtgtcaaatgccatcaactgcacttgattctcacagctcctcaatattgtcgaggtcaatataccagctcaacttgaggaatcactatccgatgaggatgaggaaacccattcgccagggtcagactccccttcatcgccccagtcccaggcggcgccagcaagaatggtcctaatcccagtaatacagttcatagtcatcgtatcggaagttggatgcttgtggcacagaattttgaatactttgaggcttggggtttgttttgcaatctcagtacccgtcgcaatcatctcactgtataggctcaaggctctccttggctcattacagtgatgactaaatcctgcggagaatcgatcgacatcttggagactgagattgatgataatactctcaatctgcaacggcatagcactgtcgccctgccgaaattcaaaaatctgtggacaaattctacacatgcgtaagcgcacagacctcagtgaagggatctgaagcgccagctgaggacgaatatgtatggcgctgttcatttctgatccgtaggtaccaggccgctcaagaattgagttgggtcccatgatgaaatatattgctggcgaggaatcagcggattgattgggtcgaagtggctgcggacacgtaaagtgaaagatgttaaatgattgctccgtttagccaatgaagtgagtatttcattgaatttcgcgagatcctgctcagcgggccagtccttggggctatgcgcatcaatggtgagctgtcgcaaaaacgccctcaggtttgaatacacgttttcgggggcatgtaccaactgagtcgcactcagcttcaggtcctctagcaggagcagctttgcaatctgataccacaacttgcagaccaacaaacagcaaacttcctgtttgcgaagctgatcgctacctataaatcgaatgatgatacatagtatctcggatggtagggtttgcagtgtcattggaggaatgtgtggagaagcagagtaaccgcgagtttcaagagataccaagacaaacgcacaaactgcacaaatgctgggtggccggcaaggcggtcacccagtgggtccagatcctactagttagcagatcttagatcttagatctttgaatctttaaatgtttaatctttggactgtccaatatttcattagtcttcagttttaagggagatcgcttattatcttggccgtaatcttgtttccacagtatgcagaggatgtacatccagagcctgcatatacagatgcaacagaatccgacaggtagctagttccgtccctcctcttctttcctctcctgtccgtccatcatcattctaccagaatctctcttgtctttctcatacgagttcatccaataagtagatctctattagcaaatcatccgtcgatttctaaaaggcaaacaagaaatttgctcaatatgttagcagacttgaaactttttactctcacaatcatcccttacagtgggtccttctttgcacatgtaactcttgacagcacctattcttactcgggaaccgttggcagacttgaagtgaagtgagattaaaagaatgcaaataacatatctcaactcgtaattctgttcgcacagtataacttgtccactcctcaatcttgttgtacccgttacgggtgtatattttcctgccttcctcgtttatctaggcagttgcaattgctttccaactcgagaagtgagaaagcggagctcaaatatgctcacttcctactttagccgagcgtccagctgatttagataatcctgaatggtgactttctctggatcggtggtcataaaagcatgagcgatatactcatccgctatcaaactcgtcagctccacccactttcgtgatgcggaataaattgacataccgtgggttttcaactcattccaagcatcaacaatcgttttcagctccctgtctacaagtagcatgggcggaatctcctgcttgtcactttcaaataagtcgtagactgtagtaaggtcggcggccatcagagcccaagcgccctgaagcagctcgagcgtttcgacagcaggtccaatcacattgatgatatctgtgacttgggccttggaggcaggtaagtcactggtgcaaaacaactcagttggcaaaaggctgtacttactcccatggattgtatatcgccttgtagccgaacagcaatctgtagcttttctacatttgcatcgatcgtctcttgaatctttttcatgctcgcctccagccgtttgatgtcactttcggcgagaatatcaactgtgacaccagcaatggtgccaatgaacggtctgtttttgatgactttaatatctaacctctggtttgtagggtacccataaacttacatccagacgtagtaggcagtatctttgatcttatcgtggtctgcgagtatgtgaaggagttagtagtgcattctagcgaggtaaaggctagctcttcacctctgtcaatagccacttgtaggtcctggatattcttcctttcctccgcaataacagccgtcaaatgctctatatcattaccctcctcctcaagaagcgattttaggctcttttcatcgccctcgagagtagactcgtacgccttacagtcatcatgaaactgtttcaaggcactcagggtctctgcgattttgtcctggatagatgaaatcttcttctcctcgccgttgatagcacctttgatactcgattccaaatcatcaagagtcttttgatcgggggatgccttttccatttcgtcgttatactgtccaatccattctaacatgcctcgataatatgagctgtcgcttgttccccctgctaatgtggcatatgttttgatcgtacccgagaggtccacaaggccattccaggtaacttcctggaaggtggtacaactgctcgacacctaatatgcgagtgggagattagcttgtatattctgtccagccagctagttacattgtgcacgagctttgacttccatacatacctcggtataggttccgagtaggttgtccacctctttccaaaccttgtcactcatctcgttggtgtcagtgagacccaagactctgatgtaggtctcgcggtcggttgggagcaactttccagtccataggaatctactgagagctaccatattttcatcatccaagaggaatgtcttgtcgtcatcctgctcggcgctgaaagcagtaatcttcttcgttttgttgtcaagaaataggccctttggataccagacactcgggtcattgatgggctttgagggatcgaagctggtcatgattgtcaggataaaggctcaatgtgcgttgataaatcctatattgaggaaaggtgaagaaatgctatctcaaacagtgtcgacgactctgaaatagaaggagacgaaataatagcttacatggctttcctttataccctggtttctggatggctacgttcggtcattttctcaaatggcggtctatctcctctacagtcgtagataccaacacgtgcttctctctgcctgctgtccttctttctggatgatgagctcataggttcggagaacacggtcatatgataaggagtaaataatgaaactgcatgtactatatgaactcagcttcgggtatctatacagacaatgcgggccgagcccttgcattgcgctattgttaatacttacatcttctaaaagcaggatatgtgtatgttgatcattggggggaaagaggggggtagtatcaaggtcgtgaaacctgcatcgggaactccgacaatgcatgcagggatcgacagtggatttcgcgtaatgactcgacgacctcgccaggtatccatctgatatagatctagcactttggatcaactcatggctaattatcgatgacgaatttcttccaagaggcggagtttggggtaattttgatttccgatatgtgcagacggagctttaaccaatttacagaagatcggttcataagcatcagattcgtagagccacaagtcataccgagctacgaataaacatccttgttcaatccaatttagtcctacaaaccaatacttcttaatccgaacctctactttatgttgacttttaaagtctttgtggcccaacaataaaccaaatcacacagtatttattgatttcaagtattatctcattaaaattgaattattatagctcagaacagagtatgtagtaataggtagtttcgattcatcgcgcatatctaggcatcggcagcaagcaatgtgtcacaagttctgatatccttgtaaggcccgcatgtgagttgggactagcccaatgaacgaatacgggaatgcagcttgcaaaagcaattttcaggctcctctgctagccatgctgtactccgtacgactctccacgatgcatgcatcttcttggggcgatagtaaaagccttggcattctgcctatcaggctggagtgtcattatcgaatccgtgacgttgagcgatttactggtcctatgtttgcgactgcggattgattacgcctcttcacacctaggacatcaggtgttccatttgcctactagccaaaatgattcgtgctccatggagaaataacccgaccgtccttccttcctataaaaccctgcctgctgtttgctattcttgtcaaattcaatatcagttctaattcacttcctcggagaagttgtcaatatgaccaatatcgcaccccaaccgagcaatccaagccaatggcaagagtggtatgccacgctggacgatgtgctcgatattcccctgcaagcagcagactatgtgaacgaaagttcggtaataaatctagcgcaccctccaggtattaacctatttgcgctatcaactgattccagtgacagaaacttgccacccaccgaggcattctccttgatgcacccactgtcctcgatttttcgatgcacaacctgtacatctatgctgatgttcttgtcttcccggcgagcgaaatcacaatttctcctgctgcaagcggtattgtgcagatcctagcccgagttctcactgctgcggctccaatcactctattgattccccctggtgatgcggccacatgtgcaatctcgatctatgcgccagttttagaccagccgatatcagtccgcacgggtgattctaagccgataactctggaactcggcccaacgacagccaacgttggtgttatcctaaccttttctggcggagaggtgacggccgactaccagaaaagataccctacagataatcaccccgaactgcaggccagtctagagactgaattgcgcaatgctctatctgggttttggaaaaatagttcggttggcatttcaatctgcgcctatgttgcagctatcactcacaatcagaaggcctattcaatgctgaatactcaggccgcggcgttgggtcagcaactcgcagggcgagcaattgctggtccaaatatgagctacgcacctacattgcctcttgacacatacgagaagactgcaaagttagcattagctgccgcatctgaatttgacgaagaataccgaaacttccaggacaaggcggagtcgctggaaattcagatccaggcgtggaaggttatgctatctcaagccattgccaatcaaaccatgcggatcaacttgcgtgactcggcatttgacaaatatcagtcagctgccaagtctgcagcctcttgtgagacgcagttccggtatgagaatgatgccgtgaagagcgccgagatacaatttcaacttggaattgcggaatgggagttcaatcaggagcttaaagctgtatttgagatattcaaggctgttatcagtaagtcggtcaccttctgcttattctatctatcagtttagtcatgcgattatccaggcttacatgatatagcttttgcagtcaatatcggcgagctgtgtatcggagaccctgctgcagctggcggagcagagaaagccgtggatggcgccgttgaggctgttgaggaagcagaaaagattaccggccagatcgaaaagatcatatcatcgataacattggagaatctgggaaaagctgcaaaggctctatacaaattgtatccgtcggtggtccaggttgtggatgcggtaaaggctctcgagtccaattccgacaccgagatcccttccatgggggatatatctggcacgacagagggtgacgctgattctgctgctattgtgacactagcggcatgggatgtatggattctcgaatcagatcaccagatggagtttgcggtgaagaatgagattgggggtgccagtgagtatcagcttgcattgcggaagcatgcgatcaatggaaagcaactggcccagacccaagctgaagctatcaaggctgggtatgaatatgtccaggctcaaatggaagtcattgtctgcgcaaagcaggtcaatgatcttcagggcttgatagatgagtatacggggcaggaggatatctacctacaagctaaagttcagttatatgatcggctaatggcacttcgaacgggtgttgtgattgaactgcagaacatggtttgggcatatcgatactgggcgctcgcagagagtactctagtcctcgatatcatgaagtcagtcgacgagtacaacagcgatctgtacaccattgcacttgccatggagacaatcgacggacaatacggcagtgattaccaaggtaattagcttatccacccctctctagggctaactgaccgttctgttcgggtagactttgggtacgatcacaagtccgaatacgtatgtactcttgatccttgtgagggttgccaccactgactggcacgacggtagcttcccttggactttggctctttgctgctcgagggcctcactagtgaaaggcacaccggtagctttaccctcgcaccggaagaagccttagccggtcaattcgttgagggctcccactaccgactgagtagcttagacctgactctcatcggagcacgccccaaaagcgaatttctggaagacggtgtagtgaaggtttctttggagatcaccacatcgggaatatacagcgatatcaacaaggatcaggtctttcactttgccagcgtcccctcactcgttcgttgttcttatcagctgaatgaagagggcgacagagggttgacattggaatatcctgttttcaaaaccgaaaaccatgccgagcccacaccttttacacagtggcagataaagctattgcatcctgagagggttgatttgagtggattgacagggattaatttgaattggaaaggccacgttcgttttgatccgacgagacgatctaaagaaatatcgatggaggcttgagatagtagcaagatagtggatagttacctggaatttgtatgtaagccagtaacaaaattaagtcacttttttcatatcaactgctttatcgtcaaggggctaaattctgtaggaattaggtagaatatacgattttttctgatcaaaatgaatgtttttttttgactatgtagaccagaagtgggcagaatatatggcagaaattatggcacccaatctggaaggcggtactaaattttcggggggacaacccgagaaaattgcctgcgctatgaactagacagacgagacaatcatctgcgacttgagctacgaaactctttgttctctctcaaccatatgcctctgcaatctttaatagtcagtctatgatgtatttgaaaattttgtattgacgattgcacagaacaaaaatttgaagctataggggattaaggcaacttaggcataattggttaggcaaaggaaacaagactacatctgtcaatctgacccataaactccatacctcagccactgatatgattccttgaacttttggactgcatgtgagaaatcaggtcagcatccgtgaacaatgacagacagaaggatttcgtcataccttctactgccagatcactccacatctccagtagttcgttttcttttaggttgagaagaggcccaggccccggctcggtgttctcggtgatgtactcagtcagtgcagtgagatcattgaatatattgtatgccgcacctaacgcatacttgtcaatctcaaacccagcaactcgacaggggatgagcctaccgacagcgagctgcaggtttgccaacgaggcacttgagtcattttgcatgttctggtttgcgatgattccctattgaatctcactgttagaaacagcgcaaaactgaaggagcggttatatgcatgtggatttatcgaacttgcattcaggatatccagtgctctgcagtcactttcgaaaccctcctgtccatttatgtcaccttcgtgacacttgcggagtcggtcgatagtgtcttgtcgccctagttcctcaccgacttgtttgaccagcttttgtccctcggttacgtttccgatagctgccacaaggttgtcggttgtgctcgtgcactgtttagacaggccatttactttgtccaatcggtctttgatctttgcctgaacctctgcacgcagactctcgttgtctgattcatcgtcgtaaagccttccgaggtcattgaatatctcatctgttttgaacaaagcaaaaagactcagcttaagaaaaaaccaaggaatcaaaaatccgggctattcctaccataatcctcttttgctgtagccgaaagtttgagaatgtagtcacagatatcccccacagaacgatatccgccctaaagcaaacgattagattgattggcattgtcaattatcttttccatacctcaagattcatagactggctggtaatctatcgacgtgtcagtaggtgggtgtgagaaaaggtcagggataggcctgtactgtgtaaaagtgttccatgaccggaattagcaggtctacatacagctataggtatctctagattagttgggatcaaagggattagtttggtagtccttattttacctcttgccttccctgctctgtgaatggcactctatagtcaagcccagaatcattatagggtaaattctgtgttgcctgggttgcctgttggagcttgaagaaactcgggccgtcacagcagaaggttttgctgttggtgagtagatcccttgggctgaggaaggattcatcgaacgacatctctgtttttcaaaagtagttgctggattgaacattcgaaaagatagaagacgaacgactcatttatatatatcttcaacgacagaaaatacaaggttcatttgttggactatgcacatatcttcgaggaacaatgagtaacgcatgataaatgcaccgcgatatgattttattatgcatgtaagtctgcccaagatgcaactttctcctcaatacggtaatctgcatgcatacgtgaacccctctgcgtctgcgttgatgatcgtgtaactgtacggaccgtcgtacggatttgaaatgacctatgacagcataggtgagtgttcaagtctacaaaaaggaccattttatcaaccatgagctctatgtcggtagccaacagcgtctatagtcggaaaatatcaaggttgttaagtggtcaagccagcgtaaaaacgccgttttccacttaataacagctctgctttgcccatattcagaattcttagaatttaatatcgtatctctcgttgcctagtgtttctagttttacttggtccacgaagccagagttgaaggccagtgtaatgctcttctctccttgtcgctgtttgatgcttcaaatgaatccattctacgtctggaatcgactacttctggggcttttaggatattaaaagtatatcaacacacaattaattattcgatatagttttactgtccataatggatgaccgcagctgcggatcgggctatttaaggcccgagaatggtactccatacgtagagtgacttggctacgatgcacatgcgttgttctctttgatctcctgtatttccctcaaattccctactctttgtcattctcctagcccctatttgcaaaactcagactagattgaaaaattctctattgaaatgggttctatcgaaaaacactggatatcgtttcaagacatgaaccctgagagcaaccacaaagaagataaaaaaagtcctcgaaacagctaatttcacccatctctgctctgaggcttcaaagatccgccaacgagaagagtccctagattcgctgatattcgccgctcaactagcccgctatgtctatgaacttagcactctccgatttagcaagatcggctgccgctcgtaccccgacgggtccgacgagcttgaaccatcatcattccaaatctcagattcttgggttggactccgtcgacctcattgaaatacttttatctattccgaaaaggccagacaagggaaatccacgaaaaacacaaaggcgaagcaaactgggaagcagccgtttggttcctcgaaaagtcgttgacatcgatggtaacggaggagcatgtatatggcccatttccattgtgtcatttggaccttcacttcaataatatgctcgttgatgaagatttcaacatcactgctatccttgactggagcaatatccagactgtgccgatggagcgttttgcctcaaacccggaatccattgctcctcctgccgcgccacaggagtttaagcaggcggtctttgacttccgcgatatttttgttgatgcgttagcaaaaattgaaggggagagcggtgcctcatcgtctgatggaggaattccattatcacggctgtttgcatcccccttgtctgaggtgctttttcgatgtacttgtagccctgcacggagagctatcttcgacgctcagctcactctctctctaacttatggtaaagatgctaagtgggaggatttcaagagattcttcaatgaccgtttggcgtgactcgccagttgaggaaggtgcattgcgaataggaatattatttctcgccaacataataaaaaatagaggcctactaaagccacaagtactacagcaatagattagaaactgtcaagaacaactggtattgatggctgttgaagctgaatgcaaactattgacattgtatgtcgagaaatcacaataccagagagaatgcaataatacatgacagtaagattcttaaagaagggtagggggattcatatccggtgagagggtagtttgtttcacccgctcaagagccgggactatgacatcgcccttggcagagttagtgatctggtccttgacggccgaaggattaggcgatgtgcctggtgtgcgttcgcccttgccatggcgctggatgagaccgttggtgatgccgagcacagagtcgacaatgacggcgtcgattccttcagagacttggtactgtagggattatgtggtaagacggttgtttgagatttctagggatgtgaaaagaccataacttacgtcgacgttcttgccctcattgttgagtgttccgtaagagacacacacaagaccggactctttgacaattcggactagtcgtgggcagaggaccagtggttcagcctgggtgacgattccaaggagattccaccgtgaggcgaaccgaatagcctcctgcaagctgctggcacggatgtcaccgaccggggaggcgcctgcgtcagtcaagaaaagaacggggatggaaggctgcttgaaagagagcagcagacagatgtccgggttgaagctggagaacagtatgtcgcggccgcctcctaggtcatacaccttggtcaagatggtgtcgacgaaggagttcagttccactgcgtatgtgtccatttcttcctcctcgctctcgtggagcatggggtattctgacgaccttggttagatcgacggaatagctgttcttgggaagctttagtaactcacttagttcaatattaaatccgacaggtttcgggatcttcctgaataattcctccagtgtggcgaatggtgcctgaatgtgctcgccgcgggtgttgcccttgaatcccttcttcttgaagtcgcgtgtgtgcttgatcttttcggtcaattcggccgggttgtactcggagccaccgaccgacattgagcgctggcgcgggccaagctcagattcctcgccgttagttttgacagatcccggcaatgaatgacggtaacgtccgatgcctaactcgaggaattgatcaagtgtcatggtatgaacaggcgcatctatacctgtctcgctgaccaggaagtcgtggtagatgacaggcacatggtctttcgtgagctgtacatcgaactcgacatatgaggcgcccaggttggctgcagcgatgaacgactccacagtattctcgcccaactgtaacgaattgcggccagccatattcttacctagtccacggtgtccaatgaccatggtggagctcatcgagcgccagtaggtctggttgcccgcgatagacattttcgggtgcttgaagggcgtgatgataaggaagttgaacgtcacagacccgatcacctcaagggtattcgcggcaacaatgggaacagtggaatcacctttgaggttgattcggtgcgacccgacagtgggcttgatgctagaaagcagagcgacaccccggccaacaatcttatccttcgatcctgcgtaggtggggatgaggtcgaaaagcagacgcaccttgctaggatcggtagtgtggaagacaattggctcggttgagatattgtcctgcacaggcaagtcaatcacctccggctcaccatgtgcaccgctagctgttatcaccatcgacaaagacgtatctagctgggtggcatgtgcattctccatcggaatgcggtcgaggctgactgtctcaagcggcttgcgcatgtccatagttcccagactgaccaagatcatgctctcatcggtgagatacctgtgtccaaaagtcttgataggttcagtggaccgtacgccaggacctccagaagttgggccaggcgcatttgaccggcgatcagtgagggacgactgagtcgggggcgaggaggaatcggaaccagtgaggtttggagtagacgatgaaaaatcaggctcagtggcaggagggccagggctaacttctgccaagcatcgggcgatgtcaagatggcctctgagggccgcgtgctccttagccgtccagccagaggagtcgaaacgctccacatctgcaccagcggaaaccagcattttggccacactcagagatccgtccacacaggcaatgaagagcggagtccaactatatgtgttttcagctagttctgtgtctgccttctggtcgtcgctaccatccagcagaatttgggcgcactcgtcacggccaaatcgggcggcaacgtgcaatgcagtttctccctgttcatcctggtaattgatatcgacaccagcatccaccagaagctggacaatgtcaatgaagttggccttggtcgctaataccaatactgcactagacttcgagacctgttttcttatgatgctccgcccctgcgagggaccatgctgtttttcggcatccaagagacaccgggtggttttggggtggccacccacaacactcaaatgaagcggggcccagccgtcattgtcctgccagagaggaccgtcgatcccatcgctgacatcgaacatgtcccattctttgagatgctcaatgatcacttcacaaacgaccttgaaaccatactgtgccgcatagtgcaatggagtgcgtccagcaaggtctttggccatcaaagactcacgctgatcagggcgcagcgagtctaagagaaattggaagtgaataacagcagaatcctcgcgacccagctgctggggcatgtgctcctctttgaccacggggcgcggcggttggagggtcggaggtgccgcgggtgtgatatagcgggtagtctccggagggaagttgagcaccattgacgccgcgggctcggcgtcagtcgtaggctggtcacgaccaatggaaatgaccagacggtgaaggcagttacgtctgttgatgtcatcgtcctcttctagggtgtccacccggttcaggagaagattcaggacagcacgagaacgatgaaggatagagcgctggatcagggttctgagaaccctaggataaaccgtgtctcccgcttcatctgcagtggccttcaaagtctcgagtagttcaaggaagacatgagtgtcatccttgcgcagggcatcatccacagcagtgagaatgctcgtaggcagattaagataaggcctagttgggccacgcttcaatgaaagggaagaatgggtggagctcgtgtcatcggatgccttgtcgtccgccttggactggtccgtaatgatggccatccaagcattgatgcgatcctgagactggaagacgcgctcattggaggcgaacggggcgggatcgaccttcgtctccagatagcgcttctgggcctgcgcaccaaccttcttgtccaacttcttggtgatcttgacgaagccacgtcgattgacttcaccataccattgtaagcggcgcaagtggtatcgcaggtccagcagggcctcgcgcaggtcatgccgatcctcgggctcgagagcatggcgaccatccattgagtagccatagcgctcctcgagcaacttcagacggcgggcgaagtcggaatatttcttgttgtagaaatgatcgacatcttcaacatttcggtcgaggttgtagaagaaacctataggcagcaacacaaacggcctggtcagaacagcgctcaaatgttcaagataataaattcaaggaaatgaagcattaaacttaccagccaaatccggctcctgtcccgatttgatctgctcagcagcagacttgatcagcttcttcagggccttgtacttgatgtaagagccgctccactcgggaaccgtgaactgcggcaaattgcggccgaatttcatactggcgagactaaaaagtccactagaaattcagttcagaaccacactcctttcaaatccacgctttatctgcaatttcgagttgtgtttgggctttccaatcgaagaaaattcggagtaagttcaacctgaatatcacgaggaagcgatcaggtgagcgggcgaacgcaggcaatggaagagatgaaccgcgccatcggaatgtgtgtgacagggaatatggagagggaatgtaaaaaggaaggtagaacgacaaagagacaaagctccaaagtgtacctgactgtacaaactgtacctgtctgggagtgtcggggagatgggagggatactttgcacacctagagaaagacgccgaggataaatcgagaggagaagaaccaaagagctcagaagttgagaaaagaaccttggaagagtccaggtgttctttaaagcttaggaaggcgaaccggttggaggtgtgcgcgctggactgaagatgatttgtcgatccacggggaaattctccacggtacggtcttataaatctccgccaagctacatcatatatcaaggtaccgaacactccgtactatatatacacagggacggagtacccatgtatgtattggatttgcggtgtggaatttcgtccgcaagctcacgaatatagtggattacttgtccaacgtcatacgaatgggagagaaaggataccacttgaccccccacatgcatgggatcggcgtcagttagtcattggccgatggaccctagattccctcgtatagaggtgttttgtgactttcgagagagggatcaagcatcatgtatcaacaaatacctggaatgcatataggaatgccgatgagagttcctaaaagcttgaatggctgaaagttcaaaggacccatacagggggagacccgtcacgaggtccgctacagaactacagaagcgccacagcctagttgggaattatctcgatagtcagctgttcaaatcagaggttagggggtaagatcaagccattcataattctatgagtgcaacctattgcactctgtgcgccgaattccatagattggacgcctcccttaggcgtcctaagaaaaaagcagtcgccaaatccgtcgctgtgctcatgatcaggggtcatctcagaaactcattaaaaagcatgaaatataagaggaaaatcgcaaaaactccactggatcagccagcccatcccaaagccacatgcgaatggaaaaaagtgaaaaaggaatctgctcgaaaacggaagacatcgaacggccatggccgctattcaatcagcggcttcaaggcctctaccccagcctgtagcaccgcttggttcttcgtcttcttgagacatgcagtgaggacatcaattcctcctgcggcgcgaacggcagctttagcccgggctccgatatcacctgtcgcaatgcaagtgaggttgcgtatgcagaccacacctcggtgagccaaggcatcgtcatcctcctggcacaatcccaataacagttcaactccccggggtcgatccaggacagctgctatggcggcatcgaactccgtcaacatcgcaagagccccgccggcagcccgtcgcgtcggagcgtcatcggcatcggtcagagccaacagaatgtgaaggcgttgggccgcttgcttggagccatctgcaaacttgataatgccagactcgcaagtcatcagattgcagaccagttcgcaagaagctcgctgaacttgagcattgctagacaaaagaagatcttccaccgcagaccagccttcccgtaccatgagttcgggtgcggagtcgtcatgcgggtacgaagcgagattcgtcaaagctaggagactctcaaatactgggagtagatcacgaggttggtcggccgagaacgaggcagtctcgggcgaagagaggagagagagcaggggacggacggcggatgtgacctggggaaatccagatgctgggaatacatgtgaaggatcaacagagatgaggatccgggccagcgcgtgtgatgcgatgcgtgttgtttcgttcctcacagggccagagctactctgcttcggggctgcaagggcgagtaacagcttcaccgcgccttgctgggccaatgttccacgggacttttggggtcttgtcaaggactgtagaatctttgccgtgagctcattggtggaagggtaggagactcggccgcactcaacgagcagagtcatgatgcctgcatcgataacggcggaacatcgcgacaggacagcttcctcttcatctcgaatatctatcgctggtgccttcacggtagaagggtctgcgtagttcttcaactgtgccatcttcttttgctcttcggataggttgggtaagaatttggtgagattcaaaacgactgtcaagccaccatagagcacggatgagtctttggtgttttgtttcatagccgcaatgaagttacgtaggaaaaccggatcattggcaagttgatccttgacggacggcttcaccgaggtataagccaatccttcgattgcgtgggagctgtgttcaaccttttgttcagacatcagtcccatgaatcgatgaaccagttcagactcgctgtcttgttccaagaccttaccgttgccagccgagggtttatcgggctcggatgcccgaatctttgccagggccactgcggctaattccgagcaattatcacttccattggtcaacatatgtgacaaccattctccaaatttctttgaaacaacctcgcggcacggacgattaatgcaagccgcattgagaagttccaacacgagagcttctaccttcttgcttttggtgtctcgcgatgcgattgggaggaggaagttcatgaattcgtccgacaagaagagattggcagctgcagagggagccacagggaagatggcggccaccgcagagaaagcaacgatgagatcgctgacacggcccttgccaagaatggacatgatcagtgtcaaaagcttcttctcgcctctttccttggcgacatcgagatattttgcagtagccagggtcgcctggcttcggacttctagcggcagccgattgtccagggatgagaggatcacctccaagccttcatcgtcgatcaaatgttctagttcaacggcgtggacagcgagtaaccgagtaattccctttaaagagcggccatcaagatcatggcccgattccatcaacttggcaatgaaaagctggaagagttcactctcgcagtgggatcgtgtttcctccgatgtccacacggtgggatccaacactactgtatcaagacacaccgctgctctatcaccccgatcatatatctcgtcgaagaatgctgtgacagaggtctggagctgtgtagaaaagtacaggcgaacactgacgttctgtcgtaccagcccagagatgatctcatcctgtgtcgtcgacagagattgcgggcgctgtgcgagcaacaacttcaggcattccaaagcgacgttttccggggatttcaggccgtcagtccggagataagtagcagcttctttgcccgcgctttcatcattgtgtaaggtatatcggcggcaaagatcgagaagttggtgaccgtctttgtcttcatgctgaactttcagaaaggcggctttcacttgaggattttcgggggcgatcgcaagagcttctctaagatttcgggaagcagcctattggagctgcatatcagtattccgctagcttccattgagaggtgttcaagaaatagatcacctacctctcggtggcccgcgtcgaccagttcgacagcctctcgggccaggtttacagcgcgctcttcgccctttgcttgaaccattgcaggggtgcgcaagagaaggggccaaaaatgaagattccagttgtcggatcgagctaggagggttaaagtggatgggagggcctttttttttcctgggtgaggggagtgcggagcggagagaaatagcgataaggtgggaaacagacaaccgctttttatggggaaggggggaaaaggaggtcttggaagaagaaaagcgtcgaaatattagaattttatttttgtttcggtttgccgcgctggcctgttcgaattcctaaaatgacaccatagacctttccccgtacatcgatgtactccgtaataatataccgaatcttacagttccgcgcccttttccttcacgaatccccattatcaattggtccgataagacaccaaccacagcgacgaaccccgtcacgttgtcgataagcaaatactcagcttagtccttttcgtcttttggtgtgacctcgcaagtcaacattccaaggtctccgaagagatatcctgtggcctccggtgtgcgggaacccatttttatacaactgccgtgaacagtagaaaggcatcttggaacccagatatgtacatcacaggcactagtttcatcttggcgcattcaagggatatatgccaagagaaaccatatcctttctttcaaatcggctgaaaacagagcatctttcaaccaaagttgctcagacattcaaggtaatttcagtcacccacggcttcgcggtgtgggattcaatccgattggagtgttggttctcccgagatcggtctgcctgtgagtcagtcgaagatcccgcagagtcaatttagtatgaggatgtaaaaggatgcaattcaacgacgtaggttggagatatatattggaaacagatataggacagctatagttgttgttatcaccccgtgaccagcttatcgcttcaagatcctcgacaggtacctagagcttggacttcaaagttaattccggctgtatgtgcagcacagggttctaaataaccagcctggcatcaatctgtgagcccagctcacaataatgaacaccaccttggaccgatcctccatttcaatacaatgaattccgtggatgcttcggagcattatgagttaggagctaccggtccgtattctctacacttacaagaggcgaacaactggctaaccatatcgacatccagacctctccccatccctgctcaccatagtcatcgacacaaacccacacgcctgggccgcactggaagactccctgccactctctaaagcaatcgccaacatcttagtcttcatcaacgcccacctagcatgcaactatgccaacgaagtcgccgtagtcgcatcgcacagtcaaaaagcagcatggctctacccatcccacgatgatccccgaaagcgcaccgccgatcgcgacggcgacgtcgtaatgaacggcgcaagcgacaccccagccccagaaacgaacaaataccgccccttccgcatcgtcgaagaacaagtcacccgcaatctcaaagaactaatggactcgacgactggcgacgatctacgcggcaacatgtccacgatgctagcgggcgcgctcaccctcgccctgagccacaccaaccgacgcacactcgcctgggcggaggagcacggcggcgccaacgccgaagatgcagcggccgatggcaacggcgggggcgggggcacatccacaaaccggtactcagcctcgaacgaggacgagcggctgcagagccgcatcttggttgtttctgtgagcgggtctaccgatgcggcccaccagtatatccctgtcatgaacagcatctttgcctgccagcgcttgagcatccccatcgatgtgtgcaagctcagtggcgatgcggtcttccttcagcaggcgtctgatgctaccaagggagtttatatggctctcgccgagccgcgaggcctgctgcagtatctgatgatggcgtttttgcctgatcagcgctcacgtcgtcatttggttcttccgactcgggtggatgtcgattttcgtgctgcttgcttttgtcatcgccgagtagttgatgttggcttcgtctgctccatttgtctcagtatcttctgcgagccgccccctggtggtgactgcatgacttgtggcacgcatctggatatcggagacaatgccaagcctgctctgttgccacggaaaaagaagaaaaagaagcgtgttaacggggcatccggaacgggaacgcccatgtcgacgcctacgccgggtccttgatatcttttctacgggaggtcatatcgttagagaaaaaaaaagataaccagatggtgacatctggctttatgatgtctgggttggtattactcctggatcacacattcgcttgatgctatgagcaacactacacgtagctggttcacaaggaagagatttgggacaattctcatcatactagtgtgaaacgaataggtacacacggggaggacagccgggaattttgaaacactctgatcacattgttggtgtcctatcttaaagaaggaggctatctagggagagcaagaaatatccgatgaagcaatcgctcgtcttgtcatcctgtcaccgtggaagacatcaatggtgtaaggccaaggaaaacaatggagaatcgggtataccaaggcagagatttcagatgggagagactggactgaggcagatacaggtgattgtgggcgaaagctacctcgtccatcgatgagtaccaacagaccataagtcagcagagcaaagaggcttcgctgcaagatagttgtagttcgcatccagagtgaattgcaattcttattacatatccttgtcagcatccacagcttatatcttcaacctaataatgaaacttacagttatttgcaaacctgattcgacaacctccctgggcaatggttcctcgcgagcctcgcgacatcagacaagaaggtctgttcgaattgctagacatcgaggcaatggcctgaaagatatgtttagcatccagtcctgcaccatggtaataatgaataatgaaagactcacaaaagagtcggtgttgtgggcaaagtagagttcgatgcccgaattgtttttcttcacaacgaccaccccaagggctccaaagaggacgctgttgctcacggcagggtgttctaacagacaagcaaacaaatgttagtgtttggagaattaaagcagcgaaaagaagaaaacggaccgttaaactcccttttcatccatgccctgatagcttcttcctccatcacctgggtaaaaaggccattgtcgcccatcttctgactgtaatacatcctttgcgcacaagtgcttgccgccagtgttgaggcaataagctctccagtcccagatgtaacaactgcacatgtagttccatccacatcagatgggtcttgtggaataacatgggtgccaatgccaattagggctgcaggaccaattcgacctcggtgcttcatgccaatgccaccagaagaagatcccgctgcaatgtttccatacttatcaatggcaatcgcgccaacagtgtctgtaatcgtatcctcgtcttgttcactatcggcggcatcggggctaccatcccgagataagaatgagggggagacaggttgcacaggtagctgtgagttcgcgagcttggcctttttctgacttttatgctccagcgatgctcccgggcgccccttcacatccgcaaaaaagcttggatcggcctggtttctgatttcttcgtctgctgcatggctggtcggatgagctcctgcttgagaagcacgctcgagacgttcaaggcgagtgtcaaggggagtcatgggccggcgaatccagggatcgatcatttcgccacgggtttcattttcataatcattgacttctgcggcccatacctgataacgctctagagcgacgggcgagatcaaggcttcatcgggcatgatcaccatgccatgttcccatgcaaagtccttggcaccttctccaaccaagaagttagggggcacccttgacatgcccagctgtacattagacttatcataaatcttccgagcaagcatgattggattcctgatgtctagcaggctcacgtgttaggcaagactttctgagcaagagacacaacaaacttactgggcacagctccaaccgctccatttagcccatgatgatcgacaattgaggcatcgccttcaacaaccccctttgcgttcaagttgcttccaaaccctgcatttgtaatcgggttatcttcaagcaccattatggctgcttcgacggcgtcaatggcggtgccaccactctttaagaatgccatagccttgagtgcggcgctaattcaattcacttattagactgtgtaaccatcaaataaaagaccgagactgacacttcacaggctttcaaatgcttgtgctcattctcgtggctgtggaagcccgccccagcatgaataaatatggcacaaacgccctcattcccggaggtttgcgacatcttgaaatggtcaacaagtgcaatttagggatcttccacgagattgtgcgcgatcgatcgaggtatcaggtcgaggtcaagagaagcgttgccgattaggcccgaatatccaaggcgataccttgaatcgggtatgtcgagaataccaagtttgccacgacgtcaagctaaagtgaagatatggatgaggcgcgcgaactggcaaaatcttggacgcgtctgcagtgtactcgcagattgttggatcgaaatgcaggtgctctttgtgagatcctcacttcaaattgaaacgactgaccgcctagttccagcctaaagaatcactgggaactaatgctgtaacgatatagtagactttgggcacggggagtgaagcgagagaagacaagagtctacggcgagaccatccgtgtcaaggtaagagaagaatacagataacgaagggcagcactatgcgtgccgtgcatcagaaatgataatcttggagtaataaaagactgaggggcaagagaggcttagggattgatgatgtgcgaatgaatagttagagaatattgcagatttagggaaactctcatagcactggtcgctcttgccattttggtctaatttcactttttgctgaaagtaagcagtacaattgccgtcaccagggcgacatacaatggatggttgtctgctttcttatgtacaaagtaggaaagacctgaggatattttgatacttcccggcacatgatgttgacgtgtgaccgacccccttaggtaatctgacctccgggcactgcatctccccccgccttgtctgcctgtcctcttggtctcttgaagtcagggcattttcggctaccaattgagatccagccgattctctcattattgtctcactctatacatcgcctacacttctttcaacccctcactgtattgtgatcgttcctaggcccaaccacccgccatggcgtcccaaacaccagccgttgtcatggacaagtaagttcacatctgcaagggtcaaagtaatatttcactgcttactctatacattttctagtggaactggctattctaagcttggtatgtttttctatggtggttaaagagctcgcgatcacggattaggctgacatgctacctccaatattccaggtttcgccggtaacgactccccgtcatttgtatttccgactgcaattgcaaccaaggctggtgctggaagtactggtagctctgggggcggccgacccccagtcgcaaacaagccctcgttcctaggcgctggcagtgggagctccaacctgtctgcaaagcgtggcacggaggacctggatttctttattggcgatgaagcgctggctgcgggcaatggtccaggatatgccgttaactacccgatccggcacggacagattgagaactgggaccacatggaacgattctggtcgaactcaatcttcaaatatctgcgcgtggagcccgaggaccactacttcctactcaccgaacctgtaaggcgactttatatgatagcagcgtgctgtgtttaaaattgtgaaacccctgacatttttggattatagcctctgaaccctcccgagaaccgcgagaacaccgccgaaatcatgttcgagtcgttcaactgcgccggtctttacattgctgtacaagcagtgctcgcccttgctgcctcatggacatcctcaaaggtgacggaccgatccctgactggaacggtcattgactcgggtgacggtgttacccacgttatccctgtcgccgagggctacgtcatcggatcctctatcaagagtatcccgattgccggacgagacatcacatatttcgtgcagagcttgttgcgtgaccgtggagagcccgatagcagcttaaagacagcagagaaagtgaaggaggagtactgttacgtcagccccgatattgtcaaggagttcgcacgttatgaccgcgagccagatcgcttcctgaagcacaccgtcactgcgccgaacgggcggagtgtaagtatcgacattggatacgaacgtttcctcgccccggagatcttcttcaaccccgaaatctactcgtccgacttcctcaccccgcttcccaatgttgttgacggcgtcatccagtcctcccccattgacgtccggagaggtctctataagaacattgtgctgtctggtggttctactctgtacaaagactttggccgtcgtctacagcgtgacattcgtcacttggtggatgcacgaatccgtgcctccgaggctcgcagcggtggcgcacggagtggtggtctcgatgttgccgttgtcactcacaagcgccagcgccatggtccctggttcgggggtagtctgctgggccagacgcctgagttccggagctactgccacactaaggcggagtatgacgagattggtcctagcattgtgcggcggtttgcgctgcttggtggcccgggaagctcgtaaggggaaaatgagtgaaccttatcattagatacttgtcaatcgatgtagctcagccttttgttcatagttcgttgtcttatctttcttcggtggtgctgctctctgttttctttttacccaaaacgggttgcgggtgttagcggcattctctacagtgcacaaagccgatttataacgtagagcatataggcagtctgtagcctgaatatcttgaaattttttcaaaaccgaaaatgtattagacagcgtacatatccactagcgccatcatgcttttttggacttccttcccaaacgccacgaggtatgcaatgtcagataaatgtacagcctgaaaaggctcaatattattacttttctggggttttttcactcaaacggcctcagcctgaggaaaagaggtgcggttcaaaatagccacaccctccacgtgaccggtctgagggaagaaatcaaagccacggacgctctcaatctcatagcgaacattctgcttctcatcaccctgaaccataacagcaatgtcacgagcctgggtatggacgttacagctgacatagacaacacgacgcggcttgaaatcaagcatctgacgcaagaagtcttctgaacaacccttgcgaggtgggtcaataaccagcaaggtctgatctggtgggtacggaacttccttgaagagagtggcggcgtcggcagcggcgaagcctgtgttgggaagattgtttgcacgagcattctcgcgtgctgaaacgatagaatcgcctccaatgtcgacaccgagactggacttaaacaaaggggagagggtgattgtgaacaggcctgagccggaatatgcgtccaagaggtacttgattggttttgcgtcttggtcgttgcctgcaggaatggcttgagagcggatgtactctgtgaagccggacaagattgagttgttgttttggaaaaaggcacctgccttgttgctaaagatgtagtcgtcgacgtactcgaaagacgtcgcgttgttgtctgtgatgcaacgcttttcttcaatgtagttttcgcgctcaatgcggatcacatcgcccgtgtctgcgttgggagtagcggcaatcccgccgacattgggagtctctccatcggcggtaggcgcggcgtctttgggaattcgtgcggtagactcccgcatcaggagagtggcacctcgtttataagaacggatgttctccgcaactcgtttcctctcactagtgagtccgcgacgcacaatgtctgtgcccaggggacagtcttcgatgtccatatcgagtcgtcggttcttgtatgtgaatccaattggggggacctgcggttgtgagggttcttcgccatcctgcttagaacctttgcctgcaccaccatgtgcgaaatgaggggtgagttttgttcgatatccaaattgcattggcgaagcaaaggtttctccaatggtaggaataagctccgggatcaacccagagaaattggcataggctttctccacaatgcgccgtttgtgagcaagctggtcctcgtaggacatcatctgaagttggcacccagaacactccccgaagtacttgcatccaatcagcgcatcgtttctttgaggacctggttcgatcactttaacaaaatcggtcaagctgtacgacaatgactcgaaatgtttgaccaatttgacccgtacggtgtctccggggaccgtgaacggaacaacatagacatatttcccattctcggcgagcgctagaccatcacctgttgaggaaagctcagaaatcttgacatcaatctcggtgaacttctctggaagggagaaaggcacgctgtcgccgttggtttcagcctgctcagtttcgttccgtttgaggagttggtttatatcgcaaagcaggacctcatcatgtccactgctcttgttgttcttgtcgaccttcgccttcttgcgcttgccgtcaaagtgtttcttgggaccgttctgcattattgcggggactggcgcattcgttgaacggcgttgacggtataatttggatgctggccgcgcttgaacggctataagggtctgagaagacagagaagaagtgaagcgccgaacagatgaccgtattgcaaacatgtaaggtgaaaagcgacagcacaataatttctagaacgaaaatcatcaaatgagaaatttattagaaacgcatctaacgcgtcgttgattggtcagacactgaccgcccgcaagaaagaacttcattccgacgcttcacctccggctggcctcttttgcctttgcgtcctccaattgcctccgcatttcgcccttttcttcatttttaaagctcttaactggcctaccgctggctggtgagctcacagcaacgccaccatgaacattacacggccggcacgatgccttttatgcagcttcacccgtgctgccgccccaggcacgcgagtccctcgacgccaattccatcctactcccgcgtctctctccaaccggaaacccaagttcccaaatgttaaggctccccgggtggaggaaatcaagccttacacggaagagcagaaggctaagcttgccaaggagtactcggaggcacagatggctgctatcgaagccggcgaagccgctatcgacccgaaggatctggcagaacagatggacgagcgcagtgatcccatggcatttaaatacgtcgacgacttctctgttattgagccaggcattgatcgacaccagcgctccccacagtcgaactcggattacaatttcacgctgaaaaccgaggacgatttcgtgaaggacttcggtcagttctttgccgagatgcctgataacacgacaggtgcagacttcgttcggttcgcagaaaacctgcgcctcacccacggcaaggaggagagcgagctgtctccgcacagcgcacttgttccggatctcttcggacctggagagaccattgatgagccccgcgtggaagagcggaagacagctgccgagaagggtgagaaggagcggtcagcggcggctgaagaaatgacagacgccctcaagagcctgctcctagctacgggctacacggagagccaggtcaagggcctccgcaccaagacccttgtttcacacagcgtcaccaaccagacccgactaggaaaggtccgccgtgcataccgtctttccattgctggtaacggaaatggtttgctaggtatcggtgaggccaagtccgatgaagcctccgatgcaaagatccagtcgcaataccgtgcgatccgaaacatgcagcccattccccgctacgagaaccgaacaatctatggcgatgttaagggcaaggtgggagccacagagttgcagctgatgcaccgtccacccggtatgcctagtttcattccctcggacattttcatttttgctaacaataataggcttcggactccgtgttcaatatctcatctacgagatgtgtcgcgctgccggtattcatgatctctccgcccgagttggtcgctcaagaaaccagatgaacacagtcaaggccgcctaccaggcgttcatgagccagcgtaacccggagcagattgctcacgcactcggcagaaagattgtcgatgtgcgcaaggtgtactacgcagggaagatttagagccgctcatggccttgactagctgcttcgtctcagcgtgtatataatgcttctcttttccttcctcttcttcttgtgtcttttgcatgtacttctataagttggttgttaaacatgacgggtcatcaattctcggtaatcatgagctattcacagcatatctggaaaatcacatatcacaaggttccttagcataacaccatctgattcgcgccagaacaaaaatctagaaacaacaccccgggtataatacgcgagtaaacaaaaaaaaaaaccatcaaatgcaacaggcaattcccatgccttcctttcttattggaacgtcatgtctccctctccctcatatcctccatgctggtactcctggtcctggaaacgtcgatcctcgttttgctgttgttgctgttgctcttcattctcattccagatctgctgctgcaagacaatgctatacacactggccttgagcaaagtgcatacagtcgcagtcttgcgctcaaggagacgaagaccgtcgagaggcatagaggcgggggagccggcgaggtcggcgagtttatcggagagctgcgcgcgaggcatttatcagtaaccagtataaccagtatttgtagttgatatcatttccaatcgaatattgttcatattcatttcctgtgcagagattgtcccagaaagataatcaaggcgaacaaggtcttctccacgtacctggttgacattccgcagcaatcgagcgtattcctccagcacttcctgctccagatctgaaacgagcggattgttacccaagagagggttattcgagtggccccggctgtgcgaggcgtctgcgtcgttcattgattggggtattggaggggtggaggtttccgcggggtcgacctcggcgtacgagtaatcgttgtctgaatcttcgggcgcaaaggcagacattatggaggatggggttggttgctgtttattgaatgttgtagatgttgagctgcgaagtctgcgaaggctgtggtgtcatgtttcgtgttttctggggttccgctgagacgcgttccccaagcttccgctgagatccgaaatctactggggtgggttttatggccttaaacttatttcaacgtcagtcaataggttaatattatgtgttcgaggttatagccatctctgtatagcctcattttcaaaaattcgcccaaacacacatctgatgcctatttcaataacacaggtgtcattaaagacacatggctataaatacatattgaaaccatcaaggaccgtctcattttatactgttgtatattatgaatacttcgtgggcttttcctttttctattaggggtaaaaatatgtcttgactgatagtacacaactctgtctcagttccttggtgctgttcataacctggctgggaggcgcaatcgcgagtcgatttcttttttttacggaaatggcctgtattagaagtttgttttatgggactattgaaagtcccagaaatggagtaactagatacatggacgtaggcagagtctctagattttactacatgtataaggcagcatacttccatttgcattgaacaaattcgtatccgtatggaatactctgtggagaacactcattttgcatacaatatgaatataaatctagctgccttgtcagcgagccaaccatattatcctcattgttggacaaaccgcgtgtccttatttggttgtatccacgaagcactagcgttggtctcccagccgcggcagcctctccgcgcgttctaccaaggcgaataatgtctcagtgaaaattcagctctcgggggaagagattactttgagcaattactacaagccgaccgcaaactactgtaacggccaatcttttagtgcgctatttcatcaccttcccaatcaaagagagagagacccctataattccatgtatatcaatggatgcccagaggtggagagatccactggagggaaaaatcacattcagcaactgtagtcgttgataagtgactagtaactagtaatctagaagcatccaagaagctcatcgaacgattaggttttctttaaacacggttaccgtgttgcatcatagcggtgcgtagtacttcgtacatattttggtggcctgagattgtcgattccagtgtggcactggccgggattgtattggttgtagatatccacatctcaacgacttggctgcaggattccaaggactgaatcagacgaggatgaagtagacgggagtccgtcgcagttcctttttccctatcaacgatgaaaagaggggactgatctttgattggcagagcattcctacaggctaatcgaattagtcggaagaagcttgggaggctaatgtcgcaattcggccctagcgatccattgtcgactaggatgcgaggaatcgacaggggcgaagtactcggctgaattaagttagtttatatttctgcctcaggtgagctttttaattcgatactttcgagatgatttccctatttggtcaacttagtcatggttgactgcgaaaattacagatccttcttagacagggttattatatgtgaatacgaaaacatgggaaaatgtaaagttcgaaataatatgtcttatttctatcacagaaatccccatttagaagtggatattcactatcgcaagcgcctcgtggtgggtgttggtctcctattctgtacggagtactccgtacaatgtagcaccatagacgcttttaggacaggttcccctgaaaaagccaacgccaagatattaatgggtgcggagtagaaggcgatacagtctagaagacatcttgccccgcgaaatacgcaggtcttttaccgcagcgtcgaaggaatacgcctctactttatttaaatgggagcctagtcctatatatatagtgtctgatgtgacatcgtcgcctccagtgaccgagtttaaaatgccgattcgactaatatggccttgtgcgagtttgccgcccctaacaaacggattgactctagtgtaggaaaggagccttggctttgcgctttccacattaacatcttgtccctctagaatcgtcttggccgttacctcatattgtggatcatgacaacacggcccataatggaaaggacacaatgcaagtcaagtggccacttcgcccttacgtggaagaaaaaacgacacggaatacgtaagtgtccttaggtaggaagttgatattagccagtcaccccagatgcggggctcgagcggaaatagaggggcagggctcttttcgtgtcgacagttcacagacgtttcatttctaaacttatgggatctggtccctggatcccaaagaataatagagttgcccaagagatgttttcctagggttcggggtagacacgtgtcaaggttttttgccaaatacggttagagggatttctactcttagccaaccttggaaggttcggtagccaagatagccaaggtaggttagccagatttatatctcattgcgaatacgaatggccactttcgaataccattgtctttaagtttctcaggggaaaaacccatcggattcattattagggggaatggagaatgttctctgtggattcctagtgctatagtgtatgtaatatttagaaatgttccatatgtagtggagtcgagcctttacatgggatagggggatctaaagatctaacgtttcaatttccgacaggggcatctcaaggtttaagcttgttttagctcggcttgtcaaacgggacatacaaagtatggtatagttgacgagatacgcgtatggaccatatttcatcttcgccacagtgcccactgccctgtcacactgcttcatccaattgtgacacgttactcaccccgacctccgctgtccattccccatggagttctcccgtgcccacatctcggttggacagcccaatttacactgccccctttgtctctgtctcctgggtcgagaggaacgggacgtcttagcgctacggcgctatgcaagtctaggtaacccaatagattaatgcattcatcgcgcgaataaaaaagcaaaatgatatgtccccgagattgatttattataatcgtcttcacgccacatccttcttccatgtacaaccttctgacctaaacaactatcggtcatatctcatcggattcttatcaaatgagtgagatgtccacctcagctcgggctagggacaatgtcttctcaagacgtgagatcgagggcatgcttgctgaaggaaagttgattatcattgtcgacggcaatgttctccgactagattcctggattaaatatcaccctggaggtgatatggctatcaaacatatgattggcaaagatgccacggacgaagtgaatgcgtgagtctctctaacacctctctattcttgtccaattcaatttgcgcattattctaatagccttcttaaagtctccattcacaggaagcccgtcagcgcatgagcaaattccaaatcggccgaatcgagggccgctggaccaacttcttgcctcccatccaaggtggcgagttccgcccattaaccgaaaatgagatcgacgaagaagacctgactctctcagagctatcaagcgaagagagttcagcaccaccatctcctatcttcgaagccgaagacgaaaaattgggcctaagacgcaggctctcagtatcaacaatctcctctgcaatcagcgctgtctctccgtcagaagaaaccaaaccacgagcctacgtgatcgatgctcgaactcaagaggagattgagctggatgcatctaaatacccgcctcttgacgcagaacaccaagaatatatcacaatgagataccgcgagttgcaccagcgtatccgcgcagcagggctgtacaactgtaactacacagcctacgctatcgagatctctcgctacaccctcttctttgggctgtttgtatttttcctcaaacattcctggtactgcctgtctgccttcttcctcggctgtttctggcaccaacttgtcttctccgctcatgatgccggccacatgggcatcacgcataactatcagattgataccaccatcggcatgattatcgccgattacctaggcggcctaagcttaggctggtggaagcgcagccacaacgtccaccacatcgtaaccaacgctcccgagcacgatcccgatattgaactgatgcctttcttcgcgctatcgcaccgcttcttcagctcgctccgcagcacctactacgaccgcatcatggaatacgatgcagtggccagggtcaccgtcaaataccagcactatctgtactaccccatccttctcttcggccgtttcaacctctacttcctcagctgggagcacatcatcgtcggccgcgggccgaaacacggcgcaggctggtggcaccgctggtttgagttcgccggccacatcttcttctggatttggttcgggtatggcgttgtctggtgtagcattccgacttggttcaaccgcgtcgtgttcgttctgatctcgcatatggtgacttcgccgctgcatgtacagattacgctgtcgcactacgccatgtccactgctgatcttggcccgctggaatctttcccccagaagatgctccgtactactatggacgtcgactgcccaccttggttggactttttccatggcggtctccagttccaggccattcaccatttgtatcctcgtatcccgcgacacaatcttcgcaagacgcagcagttcgttcgggaattctgtgaagatgtgaacattccgtatgcggtctttaccttctatgatggcaataaggaggttatcggtcgtctcgctcacgtggccagacaggcaaaactcctggaagagtgccggaaggcttatgcggcagatccccatttgcattgaagatgttcgctctaatagagttgagcttttgagatacccattatgtagtttgtattgttttgcaaattgaaatcgcttggaattgtgatacacccttttttctcctatcaatatttctgctttgaattctcgctttattgtgatctatcttatggagacttgatttccgtctgtcagtattatacctgtgtttgacattgctggccatctacatggtgtaaatgataggcgcacctacttggcagagacaatttaatgacataagaggatcattaagtatattgaaacaaaagccaaatgatgaaatcgcttcgagtttcgtatacatagcttgacagcagaggttatcttgaaaacgtaaatttgagattgaaaacagcacggttaacccgaaaaagcaaatccgtaacgccgtccgctgcgaaataggatgaaagagcaaatatataaaacagttttcaggaagacgcgcaaagaaaacaataccaacagctcagagatcgtgacacaaaccatgaagtcagcgaacggttcgtgtcgatgctatgttgtgcctgaattgaaggcaaccaagagtaatccaaggctctaggatgtgaagaaaaatgcaatatgcaaagcaactggcaagcaataaggcataatgacaatgtgatgaaaggaaaaaaaggggagaaaaaaaagcttgaatagatccaccaagaaaaagtcccgaaacactccatacacccagcaaggattgcaatggaagaagaatagcagcatctaaatacagtcgttaatgcatcatggtcgtctgcgagccgacacacatacggctgtttccctcgtgtatcggataaaagaaaacaagtgataagacgtgaagagcacaggctttacatatcaccctcgtggtgaagggtgacactgttgaactcctcgaagggatcgttgagttcgccgttcggagttgcgaggcctgaatccattgggacgcccttcatcctggtagaatcggtgccgccaatatctacgctagcgctctccttgacattacggaaattcaccgtatccgtgccggcacgaccctggtgcggaatcataggcggcttcatgtgacgaataagggcccattgggtctgtcggaagaagggatgagccttgacatcagaggcaccagcgcgagctcctaggcgcttagtctcatccttgatcagcagtttgcggatcagagacttgcacatggtcgatgtcggctgcgcacccgagtgctctggaaagttcacctcgtcccgcagaatgctagcaaacgtcgcgtttcgattcttgcccttgaatggagtagtgccgtacaacatttcataaatcagaatgcccagggtccaccaatcaacggcgctggtgtgaccgcaacccttgatcacctcaggtgcaatatactcttccgtcccgacaaaagaatttgtgcggaaatcggcaatacatgacttggtatcaatcgtaggcaagccggtattggagtttccaccactgcgtgcaggaatcatcgtcggggcacccccaggtccagattgctttgacagatcgaaatcagaaagcatgatatgaccagactggtgaagaaggatattttccggttttaagtcacggtagatgaaacccatgagatggagatattccagcgcagcaataacctctgcggcgtaaaagcgagctgcatcctcggaaatacttttgccggggcgggtttgcagggctaaaaatggacaagtcagcaagggaatcaagaagatgatgatgtcgaagatgggataaaaaggtgaacacactcctgaagaactcgccgccactacagtactccatacagagatacaaataatcctctgattgaaaagagtgatatagggtgacaatgaacgggtggttgctcgtagccagaatctcttgttcggccaaagctcgtttaatcttgttccgtttgatcatctccttcttgctcaaaactagccgcaagtcagtaaatggcatcagacagtcaccggtatacaagagaaaaaagtacctttcatggcataaagacggcccgatttcttctcgcgcaccaggtaaactttgccaacatcacccttgccgatcaatttgatcttgtcaaagctagcagggccgacttctacatttcgaactttgatggagtttgaactataggtgcggcggaaagcagcgttactgttgtaatctgagctgactgaaggtatcgccagattggaatggtcgctgcctggatctgcaaagcccattgacccgcccgacttttccaccaggggctccttgccgagttgtgctgtttgaggacggccaccctgaccacttgtaaataggccttgggcattcggggcagaagccacacgtcgtaacttgcgcgctagttcctctttgtttgcagtggtcgcctgttctactgccgagacccccgtgacttgcaactcaggggtatcaggaggagaggacggaactgacccatcgttgcggtgtcgcaatgctggctgaccctggtgggcaaagtatgggttggcggacgcggtaggcgacatcgcatcatccagtggattaccttcactagccacggttgttgatcgattgcggcctatgcctggcaggaatcgagactgccggaaagcagacttctcgttcttggccgccccatgattatcccgttcgcgttcgcgttcggaacttccagaggggttgggatggggagaggagtggctacttgaactgttgatacggaaaaagttcttaatcctcgtaggcaaatgactagactcgttggagtgttttcgtgtgggaatggagagagcggggaaattcccgcgcttctcattatttgtcaccgccggcggactggaggcaaagagctgcgtcatattgggtgggtcgccgaaatcaaaatcgagaccgagatgacagtcacctaggacctaatccgaagggtggaaaagcaaggtgtgaggcggacgaaagggcggtaatcttcaagatgccaagtgccggctgggatataatcgcgcgcgggggtcaattgttagtaagaagcggtacaaccgggggtgtccacccaaagaactgaaaaggaaaaagccgcgataactgggctcatgaataagacaacatgtcagaacaaataaagaatgaagatcaagaattgagaagccagtgggaaaagagggaggcaaggaggaattggagtggagaaggacccgtggacgcggaggccaaggcttagtcatctaaaatcaattcaccagcagtgtacgtacaacgtctatctacgccagaaatgttgagaatagtcgagaaagaatgataggattactatgaaagatcaatttgaaaaaaaagcatcccaatatgacttcagcttagtccaaggggtcctgaataacccaaggaattagtactaaggaactgggtggcgacatgtcgagtataaataactacatgtatctacaatgtacatcacgtgatagttatacacttcattcctccggaagaatatcaatacataataatattgtacagattcatgtttcgatcccttcaaaatcgtttcctcccttgactcaaacttggtccatgtttcccaccctttttttttgcttttttctgccttttctgccttcatctgaaacacttcggagacttcgggacacatacataggcctgggctcaaatccgcaacgcccaacaccacggttgcttggtatcagttttgagcatgcacattgattctgctggtgtttacaatagcgggtgcggtgtgtctgacactggcattgatcaactgcgaggaatacccagacaggtaattggtgttttgctggctgtctggtgtctcgaaaccgagaacaagtgctgtgggtacttcgtctctcaaatctccgatcaatctcgatggattcatgagcgactgaccggcgttctggacattttcacgtgcatcatgccgtcgacgggcatccagactcgatgagatcatacgagacccaacgctgctgagaccacctgcaggtacatagtgcttacggcgaacactcgacctcgaaatcgccctgctcggcctacactgggacaataggctatccctgccgaatgtgttattccgagacaataggggtgcatccgacatgtcgtcggggtaatcccctccaaagctgttcattgtccgagtgaagctcccactgcggctattatttgttaaacccggctctttgcacaagcaagtgagtttggataggcttacctgtggttcatgccatgctccgattgttcggcgaagggtcctctccgttcaccgggtccttccacgtcaacgacaaacatatcgaaaaattccgtcggaatgagagacgattggtggtcaaacagctcagtacttctgtgcggccgatcaaaggaaacttctgagaggttgtcttcattcaacccctgtcctaggctagaatgtcttcttgtctgttgttcgtcatctgaaccgcccgaaattgatgcaccgcgggcctcattatggagatgctgaagcccaatcaaagttgcatcttcattgctgcagctctaggaattagtattatccaactgctagtcttgggcaaagaacttacatggtagtcgcgaggcttggtgaatgactcctatcatttccagccatgttggttagttcggcgacgtgctcctcgtggtcaatttcagtaatcgaatgcaatgccgatctgaaattggagacgtttcgaccgaagttccgaggcaaagtattgctgatacgacttctgtttccgggacgacgttctgtccatgtctcctgggggatccatgatatgattccgttgtgttccatctcagaacccatttcaggagaaagttgaatttccacgcggctgttggcgtcaaaggacgggtcattgtattttgtaggcacgttgccgcctgtcccattcgcatcatgaaacaactctgatcttctatcgacctgaatctgattgaagaatgagtcgcttctgtttctattgcggtcttcatttacatcatcatgaatccacaaatctgagcttccatcaacctgcacgttaccaaggtctgagttgttcccatttgtgtggcttgttccattgcagtttttgtctgctgctgttaagtgtttcctctggatttgtatgggatggccagtgtttgggtcaataatatcaaccccacgatttatgttggcacgctcaacctcattggtaccatcagtcgactggttatcatatgaaccaccattgatcgctcctccggtttgcacggtaataccttccggaccattggagttgttcacgctagccgcccctggatagcccatgagcatatcccattgatcaagagcgctgagaactcttgcccgttcgctgatgttgtaaacgcgcaaattataacaatcatcgctgggtggaatctgtggatttaacgcgatcacttcgttaacctcctccagaaatctttcatggttttggactttttccatcaatcgtgactttgcctcaatcatggtatcaagaccgaacgcgtatgccactcttacaaatccaacataaaagtcgcaatcaggcaaaacagcaaacggcgggcacatgtttaacatcatacgcacaattgcagcatcatcaaggttgataagactcatgatcagaccccatcgtgtctggcgctcctcagccagacgggcaggctcatggcgcactgtgcttggattacggcgaacgaactcgatttcgtctactcgctcaatccattcagcatatggattgtctgattccattaactgggaaacggtcaaatcccgtgaaccgacaggagctgcgaactgggatgtgctttccagaaaaggcgacggcaacccctcgtgtaagttaatatcggacgctgtggaagaatggatgattgtaaagctctcttgtgttgcttggttctgagtcccaggctgaccatcaacaaagacaacaaattcgtcgtcattcattgaggtcattgacatgggcgacgagccaccaaaacggggtgatggccttgatggctccattggaacgattcttcccccagccgtgacccgctggtgtttcggggaagtgtgcttcttcaggaattgagcaaaccctgcgtcattcgtggggaacacaggctcaaaggactttttgcttgtgcgagtcgggcgattcttgggtgctttcgatgctagagttttgttcggtcggaataacctggctgactctttagtcgggcgatttctcgggttttctgaaaggataggcttcttgcttcgatcaagacgcgctcgtctgcctgtggcgatggtcagcaagttttctttcattgggttatacagactcgatagccctgagacccacgacaggtcagcttggtgtactggaacccagttcgcaccagtgatccaatcgaatgtttgtctctttagggaagatcattgatcaaaagcatcgtcacaaagggaaactcacagtattttgcttcactggtccacttgcagtgtacacctgtgtcctggcacaatgccaatagtgttggcaagttatacttcattttgttcatggggatgaaatatttacctgtaagaataacagaaacgaaagacttcgataaaaaaaaaggaattgttgaggggatccaggtggaaggtacagggtcaatgaagaaggaacgagggctcgaggctattcagaacagatagagaccagagtcacgaggtctatactcgacgcgtccagcacgcgtcgatattggccagtagccctaaacaggaaggaaggacacttgaggaaggcagagagagaagacaacaaattcgaaaacgaaagaactcctgtccaaaaatacggttacaacataacagcctatacactctcccggattttcacaggttgaaggccactgtgtacaccccaatactccccattttcctcagaaggtgacatcacttccatgccatcgggttcaatattcccaatctctttttttccctgcctcatctcccagcttccggtacgttcatgtccctgtacagccactccaactccagcggcgagaccactggatgcttgcgtactatcagtcttggagtttccccatatgggttcactgaacgacaaatcggtatcactggcaagtttactaggacctttgaaccctcccaagcttcctttcttggggtatcttcccttgcgagcacgacatatgaggaacacaatgactgctgtaagtccaatgacagcgagcgttgtaacagcaccaatgactccggctacagcgggagccaaacctctattcttcttcggctgagatacggtctggtctaacactccattgcagaacacagtttcagcgttgcagcgtaggcaccattcttcggttgatgccagcgcaaatgtctccagctcggaatgaaactcagtatatgggattgacgcacgactagggccgtgtccaaagagggaatacatttcgaagtcggtggtgttgtcggtcccattgtgaagcaagaatctcacgtacaaattgtccatcccagggtatgttgggtacaagttgctgctgttctcgtagctgtacagctcgaaaacaaatgagccacctcgtaccaagcgggagaaaaagttgggttgatgctggtttgcgagtcccaacagagacgacagggcaacagctggctcatcaccgccgaacaacagagtcatcttctgccgggtgccacttgcctggatgttcagatcgaaggcttctagaatgctcgatgccaatgtctgcccggcaattgggctagctactctgatcgcagacccgctggaagatgattgttggctgttggtgctccatgcgtactggtccgccagcgagcgagcacggatgatgtcggcgtggttcagactttccaacaagctgtcattatgcacaacttcataatccaaatattccgagattgcaacggcatttgtgtaagttgcagaagtatcatcgtaggctccagacaatgccagtttccatagttttctataaaaggcgtctgtgtctcgtgtgatatcctgggcttcgttactcccacggtattcgccttcggcggcattatacatgtcacacatcgcgtgaccttcaatcaaaatagactgagggtcggcattaccgactgtaacaatccgagggtattggtatccgttcaatggcgcctgtgtaaacgatccgttcgcaatttggctgctcggtatgttcattgagcccaatggtgggtatagaccctgcatgaaggcttgggcggaaccaacaatgttctgatccgttgccgagagcacaaccacatcgtttgagtccaaaattattggggatatgttctggattatagtattagagcctccagacacataacgataacggaaatccgatgctgccgtggcgagttcgttggctccgtagtcggtcaatgttcgagagctggtgagctcactgggcttgctgtctccgtagacggtaaatgcaaagactccccatactttctggatggattgggagtcttgggcagagaccattaccgggccctgaagggccaggagagtgatgaataggctgtacatcaacatggtctttcaagcatcaaagaacagcaggccttgactggatggatggattgattgactagctctataaactacgggggcaacctctttgtagtaaagaaactcggacctccatggtccaggcctcgaatggtatggtagtgttagggttacgaggataccagggaaccagacggtgagatatccgctttcaggagccggtagtactgctagtagacataccggctttctattcgcgaatatcaaaactcaaggcactccaagctttcgggttcttcggatggtgaggagcagctgaatcttgacgacactattaaccttgcatgtagattcattacgaagtgtcaatcaaaaaggatacttgaggagtcactgggagctagaagtgtctagtcgatgtcaataataaaccacacaaaccacacaaaccacacactatatatattgaacagtaggataacttcattcgatttataaattcagaaagtaccatgaccgaatctgaattttgtgtggatgttcatcacagctcattttttcatacgattggtaggctcaaggttgcacacaacttatacaggtggcataggattgatgacgcgcacaaattatccgcaaagagagagtcgatgggacttttatatacaccagtctacatagatacctgggtcataatttactaattgtagataatagtatacagaacgatagaatgctgtttacggaacaaaattccgtctaaagattataagtagcgtacatgtaggcatcactagtgagcaaatcgccaaatgtatacatagcacgctagtcttaaaacggaactagccccctgtgaggtacctgccgacctacaatatacggagtacatgtacataccatatgtctctctggatattgtcatgatatctgcatattttggtagtattttctcttatgcaagccagtttgagccaagaagattggtaaatctggcccaccctcagcggcctcggagattatctagctgtaggaactcaagatcacagagatatagataaagttcctagagacgatagcagatctctatgtactcgatggaacaattgattgcctcattctcctagagaagatatttatcacctttttcccggactgtctttcttctaaaacctgggcagaataccgaaaaatcttcagcgagagtcactgggctatcgtagatctgataattgatattattgaataagagacgggtttcatgccaggcatataaggtagaacaagttgatgatcgttcgagagacctaaaattaatacgaatgatgtaccttttgcatggtgaacacacgaaaaaggtacttatgaattgacgagataaacatacgcacatttatacactcaaccacgcaacttccgccaaggtttccttctcccctctccccattaccttccttccacgaacctccacgcatacatttttttgatgtccacgcttccacccatcacctccgaaatttctaccgcccggcagaaaaatcatattttgctcctccatccttcttccgcaagccctacaaatgcgccctacccctaagccctcatttctgctctcggaagttgataccccgacaggcgcttattccaaatggtcgagactcgaggcgcgcggccatcattcgatggccaggaaacatccgactttcctcccttcccctctgatggaggtgacattggtaagtgttctcttcaagcgcctcatccgatcgtcccgttcaccagcctcgaccaccccacccatacctatcaccctcatcgccaatgggacctcaatataactctagaatcaatactcaccttttaaatctgtatcacagaccaaaaagtgtctcattccctcgacgatgaggagcatggatcgcctccggcggccaagaagcgccgtacaggcgatagctccaacggtgatatttctctgcccgacggagtcaccttgatggccgatcagcatggccctggtcacaaaattgaagaagaattggcctcggctctcggcgaaggtgttattgatacagttgagcagaacgttctcgatgtgaaccaaactcttcagcatagcactcacaacacccatgattcctctacagaggtcgccactacccaggacggcaactctgatctcaatcacgacgtggctacaatcatctctgaaatcatggatcacacagagcgtcaggagcaaaccgttgcaatgggacctcaagaactaccaccgtcgaatgatttcccaggagccagaggttttgctttcctcaaggccaactctcacctcaagattcagagtctccctatcctggataatcttgtgagttgaattgatactatttacacaatctcggcttcctaacatctggccaatcatctcctagtcgacgcaaatcttgtcattcctttccaaaaacacctatcaagaccttactgctatggtttccgaacctgactccgaaaatggccaggcatatgccaccatgcgctccttatttgaccatacaaagcgagtctacaccgtcaagcactcattccttcagcctacggaccttgaaatcacagacccttctcaaattgatgtcattcgcaaagcgaacctggcgtcctttgtctcgagtatctttggatctcaggaaattgggtttgcggacctcaatgatcatttcttagacgtgtttgtccccgagggcggtcgtttactgaaggtccaaggtgctctatacctcgaactcaagacacaggctttcatcgcagccatgcataacaaatctctcacccgtacacagctcctctacaatctgttcccggacgacatggaacaacggttgttggcgagacgtcctggtaccaggcagctggcaccatctgagacagatttcgtgaatcgtctcacctctcgccgtgacatccttctcaatgagatcaacaatgaggaagcgctgaatgccctgccggataagtatcactgggaagatttcctccgagatctcagctcctacatttcgaagaactttgacgccatcaatacccaacaggttcgtttgttgctctttatcttcctcaaagattatttttatgctaagatcatctagggaaagaaagccgtcaagggacgtcagccctcgagttcaaatggcgatgctcacgaatcgcccaacaccacccaccagggtcaattcgcactcaaccaacaagttgaagtcccggtggaccgaaacatgcatggcgaccttgtcgcacgtgctgcccgagcagcgcagattgctctacagggccatggtctccgacgctctcagcagcagtcgcaacaacagcatcagcagcaaccccaacagacccagtctcaggctagtccgtcgcctctaccgcaacaaccgcaacaaccccagcaccaacagccgccaccacagcagccgcagcaacagacgatccaacctgataatcaatatctccatggctacactgctgcacaacaatcgcagccagttcaccaacaatatcatcatagtccgaccccccctggaagttatcaaacacagcaggcctcccccttgactttccagcagagcccgttacaggccaccttccagcaatacaaccccaatgcagcgcaagctatgcaagctagagcaaatggcatgtcctccaaccatggatacatgccggggattccccattactctcagtcacagcccactcaggttctctacgagcgtgcccgaatggccgcatctgcaaaatcttctccgactagccgtaaatctggccttcccagtcagcgtcgaccctggaccactgaagaagagaacgcgttgatggccggcctagaccgtgtgaaggggccccactggagtcagattcttgctatgtttggacctggtggaacgataagtgaagcactcaaagatcgtaaccaggtacagctgaaggacaaggctcgcaacttgaaactcttcttcttgaagagtggaattgaggtcccatactacctgaagttcgtcaccggtgaattgaaaacccgcgctcctgcccaggcagccaaacgggaagcccgtgaaagacagaagaagcagggcgaagaagacaaggcccatgtggaaggaattaagggtatgatggcccttgctggagctcatggggcacccgtgtcgggacacgatatgtccgcctcacctagccttccaccggatgctaacagccagtccgtatttgatcaaaccgcggaacagaacctcatgcagactttgagccaggaggtacacggaagtcagtaccctcagcagcatgctcagccaactcctgatcacatcgatcctcatatgcagttgggacagtagaggattgtcatatccaaccatttgtcttattgatttagctttttatccgcaagattcatcatgtgaacttcggatttgcaatttcgtttcggagtctagggctggattgtgatatttgttccttcgggaaccacatttgttttactatgggattgcgacattgcgccggactgggcgattgcttttattgcatcccaattgtatgagtacatagtgatacatttcaaataaatgataatgaataaaataaacacactctttagatgtagatagctttagattacaatatatatgcgttgatacatagcgtggtagtcgaggtaggtcatcagatggcccgtgcaccacccgtgtgactttgaatctccctataaacgaacgtataaccgccgcagccattgattggccttgtacttggaactctgcagcccagtctcaattaaaggatacttgcagggtttcccgccgatatttgcccaacatggccgactctcaaacatcgcaaccttcccaacccataccccagaacggatcacaagagcatccccctccgaccgaatcggaagataacatcaaaactgagcctgatcttgatgtttccatcgaaaaagacgtcgatatgaacaccgagaatcagaccgaagcgaacgcgaacaccaccgcgcctggccaagatcccatggcccccgcgccagaaccctccaagaaggaaacaagcttgcgcgagttcctcggcaagatggatgactatgcaccaattgtaagtcatctctaaaacaagactgtaacctctctgagcttcccctgatcgcctggtcacacggtggaccacggcatccccgccaccatcgattgatcccaagatttcgcgcaagcgcatcgaaagcgagacccatgatataaaacaaaagacccatcggacaatcaaggaaaagcaaaaaaaaactgaccttcgatctccagattcccgacgcagtcactgctcactacctcaccctcgccggtctcccaccaccaggcactggccccggccaaaccccacctcacctggcgcgactcctagcgcttgccgcacaaaagtttgtctcagacatcgcagcagattcgtaccagtttgcccgaatccgcgcctcaaacagctcctccgcaaacaaccccatcggcagtctagcagctgcggctggtctcggtgctccggctggcgcaggtggtgccccagctcctggcggcgatggtggtaagggtaataaagcaggcacccatctcggtatccagcggcctggatttggaggtggtggctcgggtggctctggtcagggacgtacggtgttgaccatggaagacctgggaatggcagtctcagaatatggagtcagcgtgaagcgaggcgagttctacaggtagtacattgatggaaactgctcttcggggttttgcatcatttgtcttttgcattttcgggcttatggcgtttaggtgtgcaaatggtcctgcgtggcctgggatcatgactgcattgctagtctgggctggtgtctgggcggatccaatggatggcgttttctcttttttcttaactaacttttacttactagaatctgtgcctgcaatgctataggaactagttaagtaatgatatgaacatttctcatgtgttgctagcttcgaattatgcatcagaatctataagaacaccgcagattgaataaggactattactcgttatttgccttcctatacaggttctatttgggtattgcactttattcgcagtttgaatctaggaaaaagaaaattttatattgaactccgacccaaaagcagctaatgtcacaatgaatccaacgatatatctgtacatagtgtcgcaaaataaagagatgtaatgtagctctcctagtacaaagaagtatctgcactaggatgatcatgcgagtcgtttatttgttcttagactgcttgtatgtgaagcgcttgcgggtcctgtagagcagattgaatgtcagtaaataaccgcatcattctgagcctgctcatcatgcttgtgctgaacagacgtagaaatatgtatacatacgcaacatattctccaagcttccgtccgaccatctcctctgtcacctggatctcgacgtatgtcttgccattgtgtacagcaaagcgcagaccgacaaagttcgggaggatggttgctgcgcgtttcgtggtgcggatcgggggggtgttgggtggaggggggagggtgcgtgggagaggaagactgttttggataatccagtcagctttcaattccagtatgagatgttcccgttgtaaaggttttgtaggttcgaagggaggagtttgatttctgtcacgtacgggacgatgtttgggcctgttggaagtattagcgtgtggcctcttaggaattgatcctgaaatagagatcttctagatccgacaagactcacctttccagaccgaccggccgaaaagggcgcgtgtggggaacattttgacttgagggtttccgcagttgcgattccgcgatgttgaagatcaatgtcgaagtctcggcgggattatgtcagcacttttatagaggtcgtgggcctggcgcgctgaaagaatgaatgcaataaattggctgagtgataaacgaagatgtgatctacatagcgaattggactgaaataaaatataataaaagttgctagtagtgcatccaacggccgccagcaactgtgggcacatgcgattctatactccatctcactctgccagttcctcaaacatcttaacgaggctgcgcacacccatgagtagattctcatccgggccttgtccaggggtccagctggcatgtgcaaaatcaatcaggcggagggcgtggactttaggagtttcgtcctcctcgtcatcgtccacgtcgggcatctgcatggtttcggggtcaatgctgatattgatagcctgttgaggcatcccatcaccaagctggacattaaccatctggaaagcttcttcgggaagttcaaattcctcgtcatcttcatcatcatcttcttcttcccgagaacgggttgctggggctttctgttcctcttcaattgcctgctccatcgcttctatatctccttcgtagaccaccaatacactcgcagagtacatccggctctcttttgattcaagaacacgctgcaagtttttcaattcttccgtcaagcgctgggcgaccatttttgatcggtctatcttgcccgcctttgcgccagcaagaaaggtttcaaagccttgcttgacattatccttactgaaggagcgaccgtaccacttgtcataccgccgatagccatccttctcgatgacttcgcctctttcgccctctgcaccctcgtatttcgtagcatacgggtttgtccgatcgccctcatcggtctccccattgtggccagtccagactttcatgcccgcgatgcgatatccaacgctagaactggtggtttccttcgatacggtatcaagtttcttccgcttctcgagcggcgcatcgtccgcccataaacgcgcgccgagcttaacgtccagcacgtttggccgacggaacccacaggcgatgttctccagcacgatcgacaaaccagtatcgatttccttgcctccagagggcacccatactgattcctccttagcaggggcagcgccgtctttgtgcgtggcggttgtgtgggatggcggttggctaggctgggagaaatcggccgttacgtcgccgggctcggagaggggaaggatgccagattctcgggcggcagcaatcgccagcggttgctgttgttcggaagatgagagggatccgacgtagagaggcatgaactcctgtaattccgggtggagcgcgctggattcgtagaattctacctcttgccgcgtgcacggtttcgcgatcagggcgccagaggccgtacagcgaacgccgtcactggatagaaatatattgttagcatggacataaatcaaatatcgtactcgagtccgccagtgttggttttctttcgcacacccggctgggttaattcgtgtgggacgtcgcgtcagggcacagagcggcggtgtggaacttactgtccggcagcagcatggtcaaaagggatcagatcctcgctgcccagctgtggtgtctttcgattttctgatttcgaaggcattttgatacaatcactcggctcttatgacatgaggaggtctgtattccggatgccccaaacagctggagtagtcctgaggtgtagagattcacaggtatctttaagcctggcaaatagaatgcaaataaggtgaattgtttaaacgtatgctaaatgctaatatatgagaaagaagtgagatctggagaaatgacatcccaaacgcgggataaggggggtgggggcgatgtcactctcaaccctaatcttagatgaactatacgatctgtgtatacaacattgaactcactaacttatccattcataattgtaattcttggatttttcctttatttattttctcctttcaaactcaacaaattgtaaatcatcttataatagtgaaagaaacataaggttgtttgggtgtttggttgtttgcctgatctcatctatggatgaggtttataacgactaatcctcacaactaaacatcacgactaaacatcacgactaagcaatcagagccttgctattaagtcttgtctctttgttttgatctttccttctccttccaatatttatccttgcttctcgcaacacggaaacttcatcctttcaacctcgttacttctatcattcatcatggatgaaaggcccgagcctacccgtgaagacaatttgtctccccctgttcagtcgcttaatcctagcttctctgatgagcctatgaagcctactaaagtcatgactggagacggtgcccctgctaaccttgaccccaccatgccggaccaagagcatagcgaagccaccgaggaaggatccttcatctcttccgcggaatctgtctctgaattgcctcaattatctgctaagcaggctcgggttcatttcattgaaccagtcattccggagctcgagaagtcagaggatgcactcaagactgagcatgatgtgagtgtcccgattctatctgcccaggatccaatctcctttgtatcataataaatattatgctgacactactctataggttgaggagcctttggcttgttcggatcaggagcctaacaagcatgtttgtgatgaagctgaccttggaagtgctttacctcgtgtttccatcgctacggaagagccagagaatactacggacaactcggatatgaaggatggtgcgaactcggagaaagaacctaagattggattcaggcatgatcccgacgaggaaagggttctcgcaaacatggaacttgacgatgatgcttcttcgaaatcaaagaagaagaaaaagaacaagagacgccccaagagccagagaggagaggtaagactgtgatactgatgtttaaacaaccggattctgtctaacagcctttaatagaacgcgcccacgggattcgaacccttctatgccgatgcaccaattactccgaaggagttcgaggagaacaagaacatctatgatccgtaagtacaattctaacttccaaactgagacattgtctaacacttcatgacagtgctttgcccattcttgagtaagatccccagatattatcgcataacagccactaatatgacctatctagtcgaattgacgaggcgatcaagcgcttcttgtacaaacgacgccttgagccctacagacgcaaggttttcctcaagtacctacagtacggcggtgtcagcgtgggccccaaccattcgcagggagtgactccttcggaattgaaggagatgtctaaagaagaggccatgcaagctcgctgccacacggccaccattcctaagatgggaaaaccatacccaatctctttcaatgacgttgccactggctacctgtgagtcttataatatttgaacgcttattcgagtcatgcatgctaacttagttgatagaactgggtactacatgggctactacaatcctgatactgaggaggagatcaaagtctgcactgacaccatgaagaacttcttttcctacctgctctaccacaatgtttgccccgagcagaacgaggaccttgaggaagctcgaaagacatgtgatcggtccgccaaagagctgtggatgaaccagcaactcgtacaccatcaaggccccggagacttcaaccgcggttgctccttgctgtttggtggttactacttcgaggatgtcgttgaccccgaggtttggtccaacattcgatatgctgaccagaaggtcttcaccgctgaaatcgctcgcaaggtcgtcaaatatggcattgcaattgccgggaatgatcggactgctcgcaaattcaagatgattgctgacaaggacatgatcgaagccaagcagattccggacatcgatggctttgaggtcatctccgtggaggaacctagtgaggaagtcatggcatactacagggagctaggccccgatctgatgccagtgggcaaggttcgaagcaaggaattccgtgatcctgctagaggtcccttcgacctcactccctgggaaaagatcgactgggatgctggttttgccccaacttacgagttcgaatttctcgtcgaagctcctctacttgtccatatcttgcccggcatgaagattatcacagacgtctatcagaccaacttcggacagtactatttcgatgagattctgtcggtcctgccaagcttctacaagttcatgcacaatgactggatgatggactatgtggagccagcgcctatcaacttcatccccgacgaggaggaagtcgcacgtcggctcgcaaaggagtctattttgcgcccccctgagcctaccccagccgagtgggctatgcatatgctgacacacgagttggactttgctgtcaagcccggtgaggatcccatggtcgctgtctggcagattatccacaccctagaaaacttcggctgggacatggaggaagtcaaagacctgatgggcctggtggatccgaatccacagaaaggcaagggaagttcggcccaggaagagcagtcccactgtcgccttagcaatgagccccgcaacattcccctgttcgaaactcctaagcaggccctcgatcggactatcaatcatttccagaacccggaaaggatcaagcccgttatcgcgcccgaggtcatcgcgaagttcctcaaggagaaaaaggaaaagatagaaaaggaacaggcccagaagaagatgcccgaaatcacgatggagatgatcgtgaagttcctcaaccataagaagaagatgatggaaaaggaaaagtcgaagaatggacccaaggcatcgggtgagaagaaggctaccaaggatcaggaacctgaggtacaggccaagaatcagacgcccgatatcacgccggaaatgatcgcgaagttcatcaagcacaagaagaagatgatggaaaaggaaaagtccaagaatgaaacccaggcgtcgaagattacgaagaatcagcaacctgagggacaggcccagacttcggatgagcagcatgatgcgcaagaccaggagtctgagggacagcccaagctaggtgcccggactccgggtgagaagattgcgaagaaccaggagcccgatggacagcttaacctggaaccaacggagacttcgaaggagtaggctggtgagaagaatgaggaaaccgagactgaactggagggggactattagtgactgcaaggtcactaactagatgcagctatctgtttacgaggtgatcagtctgctgcaaatctgccggggggttttccgaatatgttttagccaaatgcagcacgagaaaatgaaattcatatggatatcaaaggaacattgacaccctcgtatcgtacgtagtcttatattatcgaacaataatctgttcctattgtttaaaaaccccaggtcttgactcaaggcctcagcagtgacttccccatggtcttccgtccttccagatcctgttaagcgagttagaatttacaatgaggattccacgcaacgaacgacagagactacataccttgtgcacctgagcaatgtcctctagcggatatatgttgtggatcttcgtcttgagctggcccgacttcagcaggccaaacagctcagttgtgtaggatttgaactcttccggagtctgtatgtatccgaagagcgtagggcgagcaaccttgacacacttgggggaaagtttcctatagaaatatcatgagtatcactagccaagaccaatatagagaggggaaggccatacgcaagaggaagcgggggcacaggaccactggcattgccaaaccagatgacagtacccttgcgcttaacagcctccaagcttccctcccaggtgtctttgccgacagaatcgtaaacaacatcgacaccacgaccaccagtggcttccttgacctgtttaacccagtccttgccctcttcgctgcggtagtcaatcaccaaatcggcaccgaggctcttcacaagcgcacacttctctgcgccgccagcggtaccaataaccttggcacccatagtctttaaaatctgcgtcataaggaagccagcaccaccagctgcggcgtggagaagaacccaatcgcccttctgcacgggataagtctcctttgcgaaagcaaggacggtcataccgctcaggaacgacgccatgacatcctcatcactgatcccctcggggatcttcgcagtgtgggccgccggcactgcggtgtactccgcatacccaccagtagagagccatgcaacccgatcgccgacctggaagccagaagtctcgggaccgagagcagcgacaacaccagcgccctcgcggcccaagatctcgggcttgggtgaggggtacaggccagttcggaagtaggtgtcgatgtagtttacaccggagatgttgttgcgcactagcagctgtcctgcttttggggtaggaactgggtatgaggtcttgaattgcagcacctcagggccgccggtctgctcgaccactacagccttcatggttgttgggacggacatgctgcggattggaatgaattggtttacaagaggagcaatgtgattgtgaagtagtgcgagtcgaggactactacgtgtaagagagcgaaacatagtaaataagtaggtggggggtaagagagatgttaagacatcagcttcatatttgtcatcggatccccgcaatgtccagagtccggcggaattgttgcgctcccttcttttcttttcttttctctttcttttcgaactcgataaattccaatcttagtgtttatacggaatacagcgcatctgactttgataacgcgcttcatacaggttcccaaattcaacatgattgacatgtcgactattcacccattttcacagggatatgacgccatttccgtcggaccacccgtcggaacaaggctatgttatgcgaatcattgcaacagcagtgcaacatgggcttgtcagggcaaggatatccaacagatccaatgcggcccttctctgccaggagactcatagcgccaacccaaagcccctggccagatctgttgctgtattagcgcttcgttttccgtacaaagtcaccatgcaagccacccggagccccatgaggggcaaatccccacgacccacgacccggcatatgtccgttagcccctagctgtgcatgaggacgacatagagctttgcgtgtcatctgccgctgactgcatcatgaaaccttggaagaaatagatctcccccgctccataaacttgagacaatacgcaggccactagcctctgatcggtccgatgtttcctaaacaccagcgcccctgaagaacgagatttccacttgttgcccaatgatccgatatgcatctaaataaatcaacctgaaacgcagcggcagtacccggggggttccacttcgtgcccaatagtcaacaggctgccatagccacactgtcttgtctgcgcttccactgcccttgacttgtgatttctcttcagcctgaagctattcttgttcgtatttttggtcttgcccaatcactcaaatggcctatcagaggtctattccttcagggtgatgcccgatgccatccactgatgcttatatacccctgtacacccagctggcgcacgcactttaaagcgagcatctttgtctactcccacgaaaaattttctctctctttcatacgcgccaccattttctgctcccctgcaaactttcgcctttcaagtccgactacttatactatgaaccacatttcccgagctattctacgagacggtaacgcaccaggttaacgtcctcaaacaagcatatcccatacaatctgtgtggcaaaaataattccatttggaaatggcttcctctcgaagctctcgacgggcgcgaccgcaatggcctccggcgccctccgtcgaggaagagccccagtccctctcgaaggagttaaacggtctctccaagcttggagacaagcccgggttcgacggtgttcatataagaggtgctgtcgatcagtatcccattatagtcgccgccaactcgccccctccatcatctacctcccctgtcagtgttcccggtgtgtctgggctcgggagtgtgtcttcggatgaaagtgcagggccaaagacaccgcctcctcaagagccgatcttccgaaacaccgtcaggtttgagacgaatgaccggccaaaatacgtgtcgccctcaactgcaagccaaccacgcggcccagcacctcagcctctggcccagcagcagcccatccgtgagcttaacccaccgcgggtacctcagccgccctcccatatccgggatagcaattttagtagacacgggccgccaatgcaaaacacgtctcatggctctcgcggacctagcgcgccggatcgcagtgatgcgcgagcgcccatgcaggacaagacttgtctacaacctcccgggccttccatcggtcgatcaaacagtgcgagatatacccattcgacacgaccaatgccagaacgccttcgacgggagcctagctcggggtatttgtccgattcggccaccacagacaacagaccaccgcaccggccacagccgcctgtgtccacggcccctgtttcagctctgccaaatgggcccaccctcgcagaacggattgaggagaagcttcgccaacgacaagaacagcgggacccgggttttgtgtcggatccggaggtacggcaaatacccacaactgtgaagcccgtcaaaccgcatattctcaacacctctctgccccctccgcctcctattccagcaccagcatcgcactcgcctttgcgtggacctcagcgtgtccccgcccaacgatcacagcatgaactgctcccggcctcacgtgcccgcgcgacatcggtgacaatgccgcctacccggtcgatgtctggatctcgccatccctcacgaccagcacctgagatgaccaagcctatatcaaccccactcaatcctgaccggtcgctggctcatctcgcaccgactagacccgcagccacatcaccacagcgccctagctcggtaggcctgggcctctccccatgcccgcgaaccatcgccgtagcaggttaccaggattggtatacgctcaaaggcctcacccacctggacatctgtccatcctgcgtgagccaattatcacagtcccgctaccgcgactacttcattccaagcctctcaaagccagccggacaaaagacacgatgcgccttcgccaacgcatggacccgtctagcctgggcccagatgataaagaaacaacacgacagcctggagcttttgtaccaaatgacacgcccaccaccaggcatgcgcgtctgtcccggtcgcatcgtcgcagaacaatcctggcatcgcatctacgacccggaaaccggcaccgatctcgcaggcttccacgtctgcaacagctgcgcgcgcaatatccgcatcctaatgcccagccaccgcgagaccttcctacccagccgggatcccagcgagcggctgtgcgacttcgtcacgtccagtccgcgattcgtgaaattcatcgatctcctcgatgcgtctgcatcccgtgctgaagcggactcctcgcgcacccgtcgcccggatatgcgcgagttcctcaactacgcgcggcgcaaggtcgtgctgcgtgattgccgtcgcgataggcctgctctgagtacgtggcactttatcccgtcactgccggagatgtgtgtctgcgaagactgctacgatgaggttgtttggccgttggcccggtctaatcatcccattgcgtgcatggtcacgacgaagatgcggatcttgcctggtgatggccctggtcggactcgtgaggcgagttgtcagctctactcgccacgtatgcgggcgaagttccgggaggcggttgttacggatgattttgggttgttgaggtctgtggcgcagaggagggttgaggccgagcggcgattcctggatcgaagggaggagttgttggttgcccaagcgaaagggtatgattgtgatgaggagatgaggaaggctgttgatgagtggaggaggtgggaatgaggtttatggctgatgactgtctgtctagtttccttcatgtgctttgatttgtgtctataaatgcatgtatacttgggagcattggggtgtacaatgactggagggagttttgttttattttgtactagcatagcatagcatatatataaagtctgcctaggtagaacatagccctgtattatccggtattagccgttgtcatattatcctagcatttgcttcttctatatgtctttctagatgctctatatcataatgtagtctatcgtcgttgcctcagtagtaccttcctctagtaagtaaacatctctttccaaggaaggagacttgtcagctcttaccctctagggctattgccatatgagctctttggtacttgcaaattcgtctatttgattgtctctttgacacctccgccttctgatccgaggctaagtggagcattcggtaaagaaagagatccccatctcatcatagtcagcgacatgctattccaagcttgtacaagattacaagctacatgcacattgagcagacatccgtagatatattgattgtatgcaataacgagccacaaccccatgctaagtgaatctagatccctgactccatatctaaaaagaagatgcaaatatctaatgcaagcaagcaagaaacagaaaagaaaaccaacacctagcccaccaaccccaccaactccccaggccaacgctttgcccatataatagcgcgtggaggcattctcccaccaacaggcgcaagcacacggattttacccttgtccacgtcaacgtcggcaacatacaagaagcccatgatactcgcgtcgcggacttcagcgggggatgccgtggtaggcgcatgagtgatagcaaggagggtatttgccagagcggagggagcgggtggaaggacctttttcagcgggacgctgctgctgctgttggcattggcattggcattcacgttgtcagcgtgctctgaaaatgagcccacaacaccagggagcggggcggcccggtccgggtcttgctttgtttcttgtgaggcgtagtcatccatgccacccccgccggggaggaaggagtcgcctgttcccagttgggaagggtcgtattcgtcttcgtcttcatcgtctgccgaggagacgatgtagttgtatacggggagggaggcgaagtcaagttgctgtgcgtggggggagagagtaatagcggaagagggtgaagaggaagggatagggttgccgaagaagtaggagcggatttgggactcccgtgttgccttgcggaaggcatcgtcacggtcgacacagccaccggatttggaaagcttgacgacggagatgtgctcgtcgaagacagcggctgttgcgctggaggtgggcttgttatcatattgtctagcaacggtgctgtataggcgctccgaacccagtactaggatcgttgtaatcgagaactctgtgacaatatgattaatgagctccatggtgccaggcttgtctgtgccaaggatcccgggcgtatcgacgatgattcccgtttcgcgcgcatcctcgtcttcggccatccggcccgtgacagacaatgccagacgcgagacgactggtcggtacacggcgccttcgccatctagcgggctttgcatcgggtagctatacacaagcggcagcttgacaggtacggggctgggcccagacatgggactgcttccccagccgtcttctacgtccaagatggtgcggaaggcagtcgcggtcagtgtgccagggacgccaagcataccctccgtagggtcgaggttcacaaccaacggctgacgaccgatcttggtcgcatatgcagtcaagatcttagccaaactagtctttccggtgttttcagagccaagaagtaggacgcgcgggccatccttgcctattgattgggcttcttcgcgcattgtctctagcgcaaagtggacgtttgcatattctaccattggcgtttcctcggccgtgtattcgctttgacatcctcctgcgccgtgacccactgtcggtgtgactccatcggaggtagttgatgttgtttcgaccgcggtgacttcaagtgcacagccatgccatgtgaaaattgccgcctttgtgccggtgaatgtgtaggtttgcgattcggcaagctctgtaccgaagagttcagccgttccgttgagaagctgcacagcttgagtcagaaggatcacaatcagattagatgagataacatacctttactttgatgatatgtccaaaggcaacctcgaaccgccattccgaacctggggtcaggttgatttgcgatggtggcgcgggtgcctgcgatctttcctccgatggctgggttagctcgaggcctggaagtgacatgttactgatcaatttgagaaatcccagaggaaatcccagaatatgtgcaattattgaaggagtgaaagaagcatatcgggcggagctacagcatggatgttttacatgtttgcattagccgtttactcagctgtcattggctaaagtgattacctccagagaactccgtactatgtagttagacagatattgttaaataactagatatgaatggcttcagtgaacgtacatctgagagataagtaactggctagaatattcacaatgccccaatacgctgactagtcgttcctcctttggttcaatatttggctactacttcgtactccatgctcaaccataccttgaatagcactgggcatttattgcattatcacattgcataatagatccattagaggtaaatgcagcgacttcatccatatcatttttcattgtttgcgcccacatgcctggtgattgccttcaattggtaactaaccatgcctcacttcagcttcgagtagaaaaattatgtaaacattagaacattgaaagtttttggtatcagctaactataccaagattacatcaaaacagatgataacctacaagaaacataattggtaacattgaagcatatcactgtcattgagcaatcgtccttgactacttggagggcagtagaatgtgggagagggggaaagttggtatcaggagagcaagggcaaggggcataaaatgagctaaaggcaatccaaataaccaagactggtgcaaaacacagggagagggaggggaggcaagatattaggaaatggtgtcaataacaggcagagggcactcagaaccagcgaggaatatatttatggtaacgacaaggggaattgggcatcagaagcgaatatttgggtagctgggctgtcgcaagcgacaaacccgccgaaaagagaagactaaaatttcaaacaaactggactttgtcaagcaaaacctcattctgtttagaagaagtatgggatggaggccctatataggttaggattgattcgggatcttcgtggcatgggatgacttacgcaagggcaaaggccacagagacaccaaagatagaacggttgcggacacgctcctgcttgagcttgttctcaagcaccttggctttcttggctcgttgggaagattcagccgatgtctcttcatcgtcatcgtcctcggccttgcgcttgccagtcgccttgatggatgtcgactccacagtagcgccctcggcatgcgccttgatagcctcttccaccatctccttagcctgggcgatcatctcttcagtctccgcagcagatggcacttctgggagactaatgggcatatccaaggaaacagtagtgtgggtaaacttgacagcatcggtggcaccatcggtcagtaatacctcggctttctcatcctgttccttgatttcctccttcttcttctctttcttctcggccttcttcttctccttcttctcctccttcttctcctcttcgggctccgccgtattagatctcgttgacttgcgcactctgatcttctttccaggagatccgctcgacctcacttccatttcagcctccacagctcgcaactcaggaatcgtgtccgagaggcctgaagctgagatatctaatgccgactgaaggctagcgtttgcagcgattgtagacggggtgttagtgacatcgttggcgaggcgggtgctacgagacttccgaggagacgccaacctcttgctcggagaagcggaccgacctctgcggttgcgctgcgacacggggggctcatcggagggaatttcgaatttcggcggaggggtgatatgcttctttgcgctggaaggaatgtccgttgggtccaacagtgctcgcacccaatcgtacatttggtattccttggagagctcaagggctaggtatgaagtcaggctttgtttgatagagagaacatcccaggcagaacataccaaataagggcgagatccacacatttccagcaacttcctcctcgcttgtgtactcgcgagccttcagatactcacgctctgttctctcttcctcggccttcgcccatgggaatgcaattttgaacattccagtcgcgctaacaaagccatctttactacggcgctgtaatgatgaggcccgaagttaatgaccgtcggcctccaaaataaacaaaacaaggggtctcaccatcaggaagtagctttctgggtgttgctgggaggtgtgggaagggaagatctcagagccctcgagatccttgggcagcggagcacggaggtgagcatactcgaatacgcctaggttctccggcttggtggcatttgaggtgccaatctgggccgccttgacggagaggttggtttgtccaagacgacggcgcgcaaggagttcgtcatctgtaatcgagagtaacacgaaatggttagcgatggcagcacggggcgggtagatagccgatgcgcgcggtcgcgccaccacgcgccagtgtttgtacttacaagtgggagcaacctcgaccgtgatgagtggattaaactgctttggaagtgatcgcgacatggtggggatggatctcgagtgaagtgggaatgaatcttagaggatcgtgcgggtgttctttgaaggaaagatgcgccaacgttggccacgtagcaggcgcgtcaagcgataaaaatcaaaggatcaaatatttaccgaccgatcctgtatcttggtagagaaccttacaaccaaaattatgattgataacgggggggaaaaaaaaaaaaaaggtcacccaagataaagaagacaatcaggagagagaagatgcgagtcgcgaataatcattgcgtcgttctgaagcttgacttgttccggtaaggtccggtaaatgggtggtcatgtgtggtatttgaggagtctggttggccaattactctcagacacagtatcggatttactccactgtatctcatttggccccgtgacattttacatttcgggccaacatttccttctttggactttgatcttcatctactgggaatgcggagatactggagcatgtttacaggacattgtttctatatgtgagtgtgattatatgcactgtctccatactgcattgaattgcttacagaaaccctccctacttttccagggagtacatataggtatgtatgtttacatatctatcaacgcatcctacgtgctttatatagagtacattcttcgcaacaaacctacaatctatgttgtacatacatcctaaacgcgggcaactacgtatgtactccgtacctccagtggtctgatcatcggcccccacacctagttggggcatagttggggtcttacggagtatacatacgctcgtcccaattctcttctacaatccatacaatgctgtagaaagcatagcctggcccacacaatccaggcaatccaaactcctggccaatataagcgtgcaggatcaacagtgcgtaaacgtgcatatggagtactccgtacagaagtgggaatccgaatagcctcgcccctctcccaccgcctttctacccccaccaaggtctcaggagactattcgagctttagcccttttcactttcctttatcatttcgagtttccaatttgtttttcctttttcctcactgtccaacttaccccttttccacgacatcacttccccgaacttcaacccttggttcagtgcccccgctttcttaatctgtaaacaatggccgaccaccatgacgatgagctcgcttccaccaccactgagggtttcaaggtcggagagaagaagacactcgatgagtacaaggagctcggtacgttgagtgatctgcaatgcatcggcaatgtctagccctgatctccccagctaaccgtctttctttcccccgcaatagacaaggacgatgaagctatgaaccgttggaaggcgtctttgggtctcaactccggtgagcccattgccgatcccaatgatcctcgcaagtgtatcatcaagtccttggctctgcaggtcgacgggcgggaggatgttattatcgacctgtcctccccgggctcagttgacagcctcaaggataagcctttcaagatcaaggagggctccaagttccacatcaaggttaccttccaggttcaccacgaagtcctgagtggtctcaagtacctgcaggtcgtcaagcgtaagggaatccgggtcagcaaggatgaggagatgctgggcagctacgcgcccaacaccaccagcaaggttgactactccaaggaatgtgagtattcaaacctggcttctatttctatgttttcaagtatggcttttattaatactattccctattagtcaacgaggaggaggccccgtctggcatgatcgcccgtggccactacaacgccgtctcaaagttcattgatgatgaccagcacactcacctgctgttcgagtggtcttttgacattggcaaggactggtaaacatgggttgagagagctatctcgttgttattgagcggccgtttgttttcaaagcgtgatgagtttctttctttgacaaaactgttagagatgtgtcccactggggctgatgctttggattcctgttttattgtttatgcgtcatactaagtctcacttattggtgtatgatattttcatagataccaagtagcacatctagctgtttgtaaaagcgcagccttatcccgaactcctgtctagtgctagggttagaaagaaaaaaatttgaaatacataaacattaacgtcaatcaaacattaacagtaacagtaaccaatgggtatcacgagaagattcagagattcacaagaagtagtcgacaattggaccagagccatccttgctctgctgctgctggcccagctgttcaaggcgatgggcatcgttctctggtgcagcatcaaaaacattgaaaaaccgctcgccagagtcactcacttcgagcacactagccaggtttccacagcggtaacaatagttaggtgcactccagaccgtgctcaggcgatcatcgtaaagaacctggtagccttcttgacagagttggtgtgcgcgtaggatgtgggacatgctgttcacctctaggaacttccgcacaacctgcgctccaaaagtgtatccggcgccgcggggagagagtgagaattcatcgcgttctgtatcggggtcagaccagaccaaatcggccatgggaccttcgtgtggaatctcgcggaaacggtcgataatcttgatttggtcaatcgaatggatggaaggtgacaagccgccatgtacgcaaaatatctcatcgttaatcacaacgctcagtgtcaaaaagtcaaacatgtcggtgaagtaatgccagacgttagcgttgccatatttgcgcgcgcactcagtgtagaagccgtatgattgggtgactccgcgcgactcgtggttaccgcggatgaggtgcactcgttgagggtatcgtaacttgagacacacgagaagtgagatggtctccacactaaaaagtccacggtcgacataatcgcctgtcgattctcccatcagcaaaacttcataccaaaagcgagcaacaaatgggttcaagctgaggcctgcttccatccccgaacagagtattatgcgtgtgactaaccgaggaataggtaatttgtatcaggacagcggccaccgatcctgaaaatctcgatcatatcaaaaaattggccgtggatatcgccgaccacagtgactggagcagcaatatgtaccacattgctctccttcatcaagagttccttcgccttgaggcagattgcctcgatcaccgaatctgcgagcagctctttattgtagagccgagtgatgcactcatctagatcgatattcgctgtgaagcaataggttaacataaccacggagacaaccatatcatggaatcaaaaaaaccatgcacatacttggtagaccaggcattgtggcgagatgcagatacagtgacctcaagacaaatgagcggcaatgactccttcggggtatgatacttgttgttcaataacagagagctccctgtaccttgttcttgtgtcaaggtagacaagtgcagagagctaaaggaaagtgatatgcgagaggacggaggtcgaggtcgagatgggatgttaagaagacgatgatagaaaggatgggtgcgtcaatctagcaaaaagcatcctggtacagccgatccttatttccagtgcaaagtgaaggctctggaattaaagatcaagacggcatcacggccgaactgcgggatgagctcaggcacaagcaaggttatatccacaccgcctttattcgtacacgccttaatttcaaggccacttttagccaactggccactatgtactattatgtagacaattcctttctcggtcctcttggtcaacaattcagagtctaacaatgattagactcaatacggtaggtccctcggctatgggtagcgtggacatattaacgcgcaggatgataacttcaggtcaaaattctctcatagagtcccccgagtcgacgcatttacaagacaatgttggcacccgagacatcaacatacgtcctcatgaagtttttagtacagcaatatcggatactcgtgaagcgaaccggtttagcccgatttctaaacaaaaccatgaacgttggccgcattaactatgagcaaaatatataactagagtgggaaccgcttgttcctctcaagctccctccgggctataaagtagcttcaggtgcagtgaaacactatccaaccccggttatatcactgtttctcttgcctgtgtcgggcggagtgctatcattggagcggccatagacaccggattttaccaatccggaccctgcttccatgctctactgggaccatataactactggattaaatttatccggtgaaagctaccttcaaattccgatcataccgcaactatctatctatacttcgtaaggatgttatatcattcgacctggcttctcccgaagctggcacttaccctccatttttcagggcttaataagacagacaggcaaaatgtgtaacttatacatcgattttacgcgcaacgtagcttacatctgcacaacatagttatcaaattcactcggcctaatcgggtaaggcgggtgcgggtcgctgcgggtcaggaccagagtgggtccggggtatggtcccgtggacagggtcaatgcccaggtgcgatctgattgctgactgagcatcccgaggtctagatggataggtaggaacattactcggtataacctgagcacagggcttcctaggtgatgttttccaggtcagtgaccatcatctgaaaacttatctagtacaagtgagtagtaattaccctgtgtggtactcagtgagcaggagcggcagcaccctgatctgggaaatggcgatcgcggtcagaatttacatacaatgtcttcagtatccttgatatagcccagaagtgtattcactcttctaaaagactcaaacatctaccttgaatttgtcccaccgtgaagtggcaacccttccatccttgatcacagccagaatgtgatcctcgacttgatccagaatagtgatatcctccaacggattttgcttcaaaatcaatagatctgcggcaaatccctcattgacctgacccaacatattttcctgcataagaagacgagcggcattgacagtagcactgcgcaaaatctgcaatggagttaaaaccgaattgcgcaccgagaactccttgctctgagcaaagtgcatcgggccaagaagatcagttccaaagcagacggtcacgcccgcatcgacagccatcttcagtgtctctaatcccttcttaagaacctcctcattcttagcagcgctgtcatcagacaggaatttcatctgctgaaacatgacatgcgtaatgagcgtcggggtcaagaaaacatccatctcagccatcatcttcgcggtctcgagatcaacaagatttccatgctcgataccgcgcactccgagcttgatagcctgctggatcgcctgcggtgtgtagctatgactcgtgacgtatgtgcctgcattccgcgcaacggtaacgatagccttgatctcttcgtccgagaattgcacatgttcaatacggtccgtgggactcgcgacaccgcccccgcccatgattttgataaaatccgctccctggcgcagctcctcgcgcgcatacttgtagcactccgctgggccgtcgacaaccctgctaatcccggagacggagccgccgcagcactgctgggagttatgggacccgcgcaagtcgccgtgtccaccggtttgggagagtgcgtgtccagcaatgaagacacgagggcccggaatcacaccgtccacgacggcttcttttatcgcgaggcctgcaccaccacagtcccggattgtcgtgaagccacggtctagcatggatttgagcagatatggctgtcgtaggagactgactgcgtcgctcatatcactgtaggcctgtagactggattcaccgggaacgactgcgatatggacatggcaatcgatcaggccgggacataggtattttccgtcgaggtcgattacattttcttcggggacgtcatctgtgatggtagttgagccgtctgtcacgatctgaatgatcttgccttctgcgattcggactgtagcatttgggatcaatttgccctcggctgggtcaacgatggttgcgttcacaaagaccaagtttctttgagagttgggtttccagggcttgataatccgggagatgtccatatttgcagtatggttttgctgattttcttttggggtgggtgtgtaaagaagtagctcacccactccaaatggaaaaaccgagcatttcaacagcccgccatccggcccggtcatgcacgttgtgttcgtaggtgatgatgatatgcgggtacttgtacccgcatattcccattcagtcgttgagtgccacagttctccacccaggctcattacttctgtattggcttaacactttaaaagccagtacataatgctttaataccctattaatgcattatcaaaaagcattaggtgccctttatagctgaccccgcctatcttctgctactagtagacttcctctataggtacgtgggggtttggcttgtgcattgattatatgcattagataccgggtatgtacctatgttgtacatagtcaaaaacaggcgtatcaatcatcgtctatcttggtttcttctttaggcactctcgactttgaaatgcgggtacaagtacccgcacggcaaatcactgacctatcacaatatatagtaccatggagtggtacaatatatatacatggtatttgacaacaatccctatctcactaggcaactatatccctgatgtagtacagtaacactgcagcataaagcaacaaagtatataatggcagtccggggagtccggggagaccggatatagaatccccatactgtctcagctatttatgaaccggttctgctgagttcattgattattagattctgtcatttacttgctcacattggatttggctgatctagctgctgcttggcgttctgattctcgccagaggcagatatgggtgggagtaatctagctagacgatactttctattacgtgctagctaactagttactgaagtagttactggagcagttgctcaagcagtttctcaagcagttgattaagcagttaataatgatatgacaaagggggcttgattttattattagtttacatacaaattgtaggtacctactgccttactattaccaaccatatggcagggaatatgcctaattgtgaaggcggggagaatgaaccagtaagaaaggggcttttcgcagcattcgaaattggaatcagtcgcttcgctctgcaacgactatctggaggccttaggtcgtggagatcactagtaagaaacatccaagatgccaccaaacattattcagattcatttcctcatattttctcatattttcaatatacccaaaaggttccccaatcaagccagcatctataaattcggacacgtttaaccaagcaactgctgtgcctctttatgcacagcttcggtttcggaatctgtctcttcttcagagtcatcatcttcttcctctgagccagattcttcttccgaatccgtctcctcttcctctgaatcagtttcaccttcttcagaatcagtttcagactctgtctcagtttcctcctcctcctcttgtagccactgatcaagggttttcttcccaactaggtctacaggcaaagccggtccgtttcggcttgggatggaagtgggcttgtgttcgcgaagtgctttatcaaggcggtcacctgcagtcatggcggtggagtcgctggatgtgtctggtttcacatcttcgatgcggaggctgggatcgggttcttggcccggctcaacccagtctgggagattcgtgtagcctcgaagtccgtggtaaccagcgtcagggccgacaacgagagtggcggagccgatgagcaggtccttgcgcgtctcggatgggctgggagcgtggggaactggctttggtgccaggagaaggagattggcaagttgggtggaagacggagtttccaggaggctcttgtagagacgcgcccggtcacgcaggtcgtaggatgtgtcgtaacgtgcaagaaggaggatataccgccataataacgtgatacggtcttcggttgcttcctctgtttccttctgttcagtgccgtcgtgttcttcacggctctcctctccctcttcgacccgctcagcatcttgcggttcctcgttcccattgtcagtccattcgttgtggaactcttgttgggatttggctggggcttcagggaatgacgacgatgcaggttgttctggctgctcctttggtgggttctgcaagagatggtgtaaatacaccttggcaccaagaagaacagtctgctgtttgacaatttccatctcgtctgcgaatcctttgatcaatatacggagcacatcaggcgcgatattgttctctgggtcaattccagcgaactcgccaaccagccagataatagtggctcgtgcgtctggatgggttgttgaacctaggtgcttgacgagctgaagaacagtctttttatgtgaagctggatcttgttggatcaagtgacgaataacagtcagtgactccgacacgaggttgccgtccggactagatatctggccgagaagaatccgtagacacatgcctgcggtacttgtgtccccttgcgcgcatcgcccaatggctcgtacactctctcgtaccagctccgggtctgtgtctttagagaagtgctctagttcgctgattatgacccccttccagtgttttccacaatgcgggaacaagatggttagcacctccagtttgaggcgccagatatgtggggggtcgttggcgtggacaaggaaatgggccgtgtatttcgcaaaaggcttaggcacccttagagcaacggcaacaatgttgtacagagcgatgagctgcatatcctgtggtgttcttaaaagagccacaaggggaccaactgctgatgaaatatattctgatggagcaaggtaaaggaagcaacggacaacgctgacaatgacggcagagtttctgctctgcagtagaaccttgcaggctcggagtagaagctcaagatcaggatccattaccgtaacttcgtactcttcaacatcattctgcgtctcctgttgttgcttttcatcgtcgtaaaatgcccccggggctgtgcgcttaaccgtctgagttcgttgagggaagcattttcgcgcatagaatgtcaacaagcgcaatgttgctagctggccccattcatccatatcgaccagcttcttgactaagctgcgatagtgcttgtgaattatgtcaatctcatccggacacagatctaagaatgccgcgactgcaggcccgacgacaaagtattgagaatcgcccaaaagtgtctcaagataccccatcagttgtggcagtgtgttcgggtccaatcgataacattttgggatagccaaagcggccgctttgcgcacgtgtggactcatatcaccacatcctctcttgatggccagcgacacaatctggctgatcaccggaacccggattcccgacatggtccgaagcgccattgttcgaacctgcgggcttgaatctgtcagcgatttctggatcgcattgatggacagtagtgccagatccggctctgcctctgcatgatgaaccaagtagatgtaaaccaatttcttgacttcgaggttggcgctggccacattcttgacaactgctgaaaagaaagtaagggatggttcggatcgatacatcaactagaacaggaaattgagtcagccattgcgttttccatagttcttgttcacgatcctcgtaccgagatgaccctccgcattccatccagaacttcccgctcatggcgactgtcaaggagcttcttgatgtgcgcggggctgtatgttcgcgaagtataatcggtgtttgagatccgattgatagcagcggactgggcagcctctaatgtgagctctcgggctatgcgcacagtgacgttccacggtcagtttaggccaaataggacggattgcaacccaatccgacatacctgtttccagcatcgaggatatcctggaaattgtttccatctttccagtttctgaatgcccagtccccaagggccttggctgagttggagggaatgggtgagaggtgaggggaggaaaggcggagcagctccgcggaagtgaagtggacgatgccgtaactcttcaccccgatctgcaacgttctgactactatttacacaccacttgattcattatctacgactaccatgaccatttgtgtttgacgggttatgagttgaagacgaaatgatccatctctcgttgatgacctcggaggggcaataagtgggagctgaacacagctatctgaaccaatgggtccaacatgcacggtcgctcactgcgagttggtctctgacctcctgcagcaactacttgaaggcaattcagatacgtaccttattgtctgcgcaaccaaagccgagttcctagttcaactcacagcagccatccgctcacaatgcgctgatccagacatggccgcgagccatggcctgctcacgaaaacaatcgggctgcttgcaagatccagcaaaatacgactgttattctgcccgagcttagagtctcttcgggcataccttgccattttcgatactgctgttggcgtagctaccgaggaccgatcgcttgcccatgatcgacaactcattgctgtccttgatatgatagctttgcatgtcacaacttcagagttctcggcacaggggctttcaagaacactcgcttctcttgttgaagcttcctccagggcggggatggatctccaggtttatgaatgcgtgaatgccctggacccttcaagtgctgttcgggggaaaatgctatgggatgtgagcgttcccttactgaacgggtcagttcgaatgcgatcggatcaaagtatctggagtggacggggcgtcaccgtaaaacgggttgccgaacgctggtttgaatttgaccagaactgggaaagaatggaaaacgcttaattctgatatcagagatgatattgtaacataataaaactcctgaatttgcactatccgggtatcctgtagctgaccgctgaactccgcacataaataacaactgattgatcatagagacttctccatctctgtcatgtacagcttgatatgtgactctaactttaggtactgatcgtgggctgactgaatctcggtctcaatgttctccttcaagtcaaccatctagaagagtgggttagcaatagttcatcacccacgacacagggtaagacgtaccttcttctctgtctgttcaatgcgaatacgcctccgctccatatcgcgctgcttctccgcacgctcctcgcggagctgtttttgcacatttcggagttcttccatgcgtgcctgcgcaagttcggctttctcctgtgcatttttctgaagtgcctcgatgcgctcgacccaacgggccagttgacgctgcaagagcttctcggtctgctcgacctcgcggacgctgttccccctgtccgaaatagcctctgcagttctagcagcacgagactcctcttcatcctctttttgcatctcagctgaaatgtcatcgagcaatttaacacatccctgcacatcattggaaaccacggtgaacgtatccgaagaggtctgcagtgcgcgtgctcgcctctccatcgcatcaatggaggccttttcgcgcatcagattctcggatagttcagccagtgaggactggaggctggccggagactcgagcacataaggccgcagtttctccgcttcttgtcgagaacggacggttcgttcggttttctcttccaattgctgctgccgccgagctctttccgtcttaactcgatcaagtgtttctgcgactcgcgactgctcccgacccagttccaatagccgcgccttaagcgcatcgtttcgggaaactttctctctcacattcgcttcattggattggagatcctgccgcatttccctcagccttaattccatctcctgattttccgccagaagttcgtctatgcgcgatttcgttttttctgtcttgttaaagtgctcgtcgatcacaggtgtttgcgattcccggaatcgaacaaagttaatcaagtacgagaatattttgacgagtcgttcatgcgtcggtttggtcaggtctgtgaaggtgaagtcgttgacaccgcactgttttgtactataggcattagcatactcttcggggcttttgtagctagtgatgagcagatacctccgccaatagctttcgcagcatcataaagaaacccatgaggttgcgagtgtcattgggaattatatcagggtagtcgccgcatagatcttctgcagctgcatgcattgcgggttccactgtctctcgagtcgtattcatgagcagttccgcgaaccattcgaacaccatctggatttgttgggcgtttggtttagccaggtcggcgagggtaaacggtataccgatatcgttgatacatcctgcgatctctttgtcgggctatttcatgttagtatcagacgaaagctccggcaaaaatcaagctcaccaagcgcatgagggcgtcattttcgtcctccttcttgcgaccccgaccgtggtgctggttgccttggaattgctggctcatacggctgttatatcccatggcggtagagttgcgcgacatgatagtctgagaacctatcaccaggcaaggggcttattatcgaagtggataggctaattgttgttgatcggggctgattgtttactcggagacaatcccgcacgacgcccgatcggggttagtgcctggaggggcattgtgcaaaccagacaaacatagaattcatgactctttctcttccttctacattgctttgttcccactcctacatcttcgacgctcaaacagcatggcttctactacttcagatgcggctgtagccgatacgaaaccattcgagtaagtaaaacgcgctccctcgaagcgctcgcacctgctcactgttccttcagcattgtcgcaacctacaatgaactcctccgctccgatgccgacctcactatgcctattgcggccattgaagctctggttcttcttctcacacagtcagcctcttcaacgatatcagagactttggatctactcgaaaaatccaccgcccacctgaaacgctccattcccaaccccatcggtctatctgccggaaccgatcttttccaacgatacctgatcaccacactacaacgccctgggcaactaggtcccgcgggcgatttcaaggccatccgcacacatctcttgtcaaacggacggctgtttatccgacgcgccaaggaaagccgagacaaaatcgcagcattcggccgtggcttcattcgcgatggcagcaccatccttacaaacggtggctcccgcgctgtcgcagcactattgcaaaaagccgcagatgaggagggtggccccgctgtgcggttccgtgttatctacgttctctcttcgatttcccaggattgcaagcagcccaatgaagaaccagagggtatggaaacagtccgtgctctgagagcgaagggtgtgccagtttcaacaattccagagtccgcggtggcatattccctcggcaaggctgatatggtcattgtgggtgcggagggcgtggttgagaatggaggcattgtgtctcgcatgggaacctaccagatcggtctcctcgccaaggctattgggaagccattctacgtggtagcagaaagccataagtttgttcgcctgtaccctcttggtcagtacgacctaccaattgagcagcaagttcttgagttcaagtcggaggaagaccttgaagaggagcgcaagcagcagtcctctgtcactaagacagacggagacacctcaattaagctacccctctgtgactcggttgatttcactcctcctcacttgatctctgcactgatcacagatagcggtgtcttgacgcctagtgctgttagtgaggaattgatcaaaatctggttctgaagaaaagacatgtgatagcaaagcctttctgctattaaattccccatatctcaaaaactttcattccgatgatatggtggggaataatttaatgtgacacctgcatctcatgcggccctcccatgtggaaggatcatctcaagcgagcaagatgggattttccttttcacacgtccaattcaatgtggatatctatcacattccttccagtgtgcagcacaaagataagctgcaggacgtgggcaaatcacacccctctctttcctgtcaatgaacaccttgacataaatggaagtggatatggaatggtttccagttgagggttttttttcttgacaaagggcttggttgaacgcaaaaaaaagttatcaacaaattttctcaagtcttttagacaaaggacagaattgtagtctggtctcctatggtatcaaacgtctctcaaaatcatacagtcatcatcatcaataatcatcaaagactctatgttgtagttgtagcggagccccttcgcaatctcatgcgttaaacatcatgtatggaaccctcggagggtgtaccttttatatggatgggttttttgtccgagcctcctggacgttaagatatccagcctcatatctcttcgcctctcggttcatcaaaaagacagtcgtaggaatagtcgtagatcataattcataattggccattcgagtctcccaaaggaatagctcaatccgcagccgagcatggaccgaattgtcacaagacaaaaattgaaccgaggcggtcattgtctcctaacctgcctatcacaccatggcaaggagctcaattggcaatgcggttgctgataacacaccattcctgtgtttgcatcccagcgaacgcatacagcagcaagtaaccaagagccacgaatatccacaaggctgccatgttggaaggatttcaatcagaaagtcggtgaaggtgaatgggatttttatgtgtgatagacgataaaggattcgaggggtatcagacgaccacgacgacggggtcaggtcaatggtgccagcgtttggccagtggagttattgtgtgctcgggatgtatgctttatagaggtaaggaggtttatgagtaatgtcaggtgctctgttagaagacataggaaatagagagatagagggacttttctctgggatctcatgctctctagacattttaaacacgaccagaccgacaattgatagattctagagtgtttttctatcactgacacacttccttccggtttcttccatccaatacgaatgcgagctgggcagtctgtctcgtccattaagattccttgtcggagaaacagatgcggggttcttgagaagattattacttcacacgtctcgagatatgaaacagtctagatttctgtatgtggcatgccgggaattccctttctgagtcatagatcacatatccatcacggatgttgggtattaagacggacgttggcatattccgccaattagggaccggggtatgatcaattggaaattattgggaggttcaatcagtcattagttgtgcgccttgcatccccaagtacatcgtgcatttctaccatagttctgcgaatactatcaagtgatatagaactgcgcccaacacctctcacgcgggcctacatgcatcctccaggaacattaatacggaaattatcgataggcaacttggagggaaccttgagccatatcacagtacaatttctattacaatggtgtatgtggtctcaaatatatatcgtggcctcgtaggtgatactatatgcatgtatttttgtcaaagccctgaatcctgaaacagctatggatcaccatcagactctgcataatcatcgtgtcacttgatatcgagcaaagatagggtctaagccgccctgatcgccaagaacgcctagaacaaccggaagtttcaagcggccacgtcgggttttggagggtgcagctgcatattcaccaaacgccctgaatcctgagtgctctacaagaaagagaatatcgagtcatcccaaggttgtcaacctcgtagagatcaaagaagatcatcaaagacgaaaatatctcatcatgccccacaagatccaaccccgctatccggtccctaaccaaaccagcaccaacctcacctccacccaaaccagagaccccaagggcccaacaccgaaagcatactagtctactcaaacaaactatacctgcatctacgcgtgagatcccaacggccatccgacaggtgccacccccgctcctcttcaacgctataccacctaccttacccgcttgccaacacccaaaagcaaaatcatggatgcccaatcgcccacgacaggctcccggcctaaccagaagttccacctaggatccgaaacccaaggtaccggtccgcagtcaccatccgatacccactgtcatagcggctggtctatcagacgccttctgggccgacgtgggagccgcaactacagcgttctggagcgggagccaaaccggctgaggaagcgcatgagcaactgagtttcttttcacggatgaagggaccgtatcggttggcgatggtgatcaattctggtatcggtccgcgcgcatccgcggaacagaggaggatatccataagccacttttgttgttggatgtctcatcgagtttttggccgtttatttttcctcccggggtcgcatggaatgcgggtctgcatcttgtattttcggcgtttggttagttagcattgggcgggtaggggcatttttttgggaggagtctgtctcatctatcttttttttttttggattgatctaataattggacgattatactccgtaatgcgaagtcattggttgccatctgagttttcctggccgacttcggtatcttgcggtggcagttgccttcgtggcgaattctcaatggcttgaggagttgccacgactttttcccgggtattaactttggaagggagatgatcgttttaaagagggcaatgtcgagaaacctctacattgtccggagtagagggtaggtactgaagtggtgaataataagatcgggaatgagatcttccaaatgcttataagcttacgttttagcgaaaaccaaaataaaataccaggatttgatggcggctgtttgctccttgcagatttagtggctgtcctgctcaacccgattctgggcgttgtctctgccgttcttggcgtctacgaccaaacagtattctccgctgtcagatcagactgtcagatcagacctaactgagcggttgaccgttgtgatcaaaatgcaggaaccacggtggaacaatctgagaccggaagtggagtggtattatattgtaaaatgaaaggtatggagtatctgtataacatagcgataaggtggattccaacagtatggagtatacggagtataatatacatacaacatagatagcgatatagaatagtaccgagatatagaatagagggtaatataagcaaggaggagctctagacaacgccctggatctaatcagaaccaccttgaattgaaaccaaataatagcgttgacaccttgcaacccgctggattctcaatggatataattagcatctccgtattcgtacgtcgcactggtttgctagatgtctttgaacgtcgatgatattgaatagaaccgagggagagattgaaagacaatgtaactataaccattagaaatagaattagtagtaatcaaatgtaatcctatagaaggaactaagacccccataaatgaaactcgccgatcatttccgtattcacgatacacgatagatttccccttacaatactactacatacatatccggtactatttacatataactagtccctgcaggtgctcaccaatagtcttgaaatgggtcgagaaacccctcccaagccgacgatttcataggtccgaatgggtcaaagtgcgtaagatcgactccattcccgcgtgtcaaaccaacgaaagggctaccgcggactcagttgggctccaccgggcgtttaaacggctggctttcccgcgtgagagggcacgaggggttagcatgcattgggctttggttgtacagggtcaagggccgatattccactcatttccgagcttgccgtatagaagatcgatttagacttggatgtccaatattgcagaggatccccccataatgtacttaaagggatgcatgtatttataacactgcgtcattctggaacccacacggagtggatatcccttctcccccacaggtcaactgccaatttccaaaataaatctagacttcgtgtgaccagagactttttaacgagattgtttacaccctggggaccaaggtaccaggtacccgtgcaactatagaaccaagcccgaagagaagatgtatagaaggtgtatagaacagatcatcgcaggcaaatataaaagaaaaaaaaaagcaaatgccaagtcacttgtttttcaggtaaaaaaacaaaaacaaggccctttttctgagttccctttggccctttgggctcgtattttcttttttttctgcctttctcaattttcatttcatttcatttcctttctccttcctctttctctttctctctctttccctctcgttgaacactcaacttctttcctttcccccttcataccccccatggcgcctgtggcatcgcactgactcccagtcattttactcgactctcctttccaccccccatgagtttagttagactgtcgcgccaccgaaccgataacgataactaatcccacttgtccctgggcaagtgcccccaaagtgccatggcgatatggccctttaatcgcaagagcaagcggcacaccatccaagtgaccggtgccgaagctgctgaccttcgctccgcctttgctgatccgatgatggagcctaccctgggccgcaaaccatccaaacgccatagcaaccgcacgacacggacggatgctgcagacagccggcgcagctcggccctcgtgccgtcgaatcgacctatctcatcgttagaccgccctgcttccattgccgatcatccacggaacgcgccacgcgaccctgcgatctcgagaacagcttcgctgctgaggcggaagccaagccaaaatgcaaatgcaaatgtcccgaataagctacgacggaagctgagcaagcggaaggcaaatgagatcatgcgcgagcgtgagattcgtatgctctcgtcgacccctcccatcgatattccccatcgtccgactcttagcagcggggaccatgtactggaaagtcgccgccgaaaggcaaatggtagacgtgccgaccggtacatgtctgacatcagcctcagcatccgtgactccgcctcctctaggtctgacatctctgacccatacacctataaggtcaacgcttttgctgccctgactccacgccctgttgttcgttacgtcgaagcccctcgcctccaacccgacagaagtaccaacccgtctgcttccagccgacatgacaaagagaggctccaggccctgaacatgtccgaggaagatttctactattccaaacgacgagtaaatgaactcgctgattcattagatgctggggctttgagagaattgcttgaccgggaccgtcgccgccgggagaagaagcaggtcgtcgaccaggaaagacttcgacgtaagctgcaggagagggctgatgctcagcaagcggaggaacgaagactccaggccgctgttgaggccgctaccgaggccgaaattgctcatcccgagcctttcgtcgctgaggtcactgaacccgaggacgttctcccgaacgaggaaaccaccgcccctcaagttgataaaccgacggtcatcgcaccggagaatgaatcgtggctgctgggggcttccaagagcagtgagcacaccggacgcgaatcgcgggaaagttctcgcgtagttgacgatagttctattcgtgaacggagattggttcagcgtcctagtttcgccatgtcacatgacatcaccatgtcccgaactactctttccccatctcattcatcaattcgccatgggctcaattccccgagccattcacaagtcggtggacccggctccacatcggacgtctcaaggggggttgattcagaacgtcgactttccgacaccagcggccgccgggggaataccattacttcgctgttcagacgtggttcttctcgtctcaagcggacatacaaggagcgattccacgacactacccctgaagtttccaacgcctcgcatgaatctttctacaagattcagacccaatcatcccctcctcagccctcggtcatccctccgagaattctaatgcccactggaaccgtgaagcgctctcaatccaagttcactgaacacttcggcgatgaaccactgtcgcctcctgactcgcgcctacagtcgccagatatcccggaggaagtgctagagtcctctctcgagaatgacgcgactttcctgcgtgaaccaagccctagtcccggtgtggacattaaaaacccgaaccgaagtcatcatcggtcgtgggcttcagatagtatggacctcgaggccgataatgtgccactttcccaatctctagcttcaattgactccgagggatcttggatgtcaggccagtttttccgtcgcatgtcacaaaagcccagcagtcctgttcgatccaatttgacctcatttggccgagactcggtagaggtcccggcagatgcttccgaagaagttgaatcactggatgagtcccaccgtcttagcacaaatatccttcgcgatccagagttcgaaccggaagcctctgacagtccggcaaacattgtcgctgaaaaatggcacagtgaggtcggccgccgccctgttctagtgaacccagtggtccgtcccaagtctacacaaggactgctcagagggttctcttcattgacccccatctctgcagaggaagattacattgtggaagagacaactccttccgggttgcagcggattcccagcgaggaactcaggattggttatgccgaatagactgagtattagtgatcaccatcgccatttaacagcaggatctaccatttatcattacatcatctgtgtcttgtgtcatggcgtgttagacgggtaccactatgcccatcgactattgccatgactcagatgcagtctgccagaggtcgtttgaaccttccctttgtacgctcttttgtcactttcctttgtcaaaatatccatccgtgagccttggattcatcctctggccatctgtacgattctgatatccccatcgccttgtatccatttattgcccttgcgagttcgtcattctcattcgatttgttgatacccctcgtcgccccgtgttttatctttaccatatgcataaattcttattccttcctattctttctgtcgaatacataagctgataaatctttattccccctcaagcgcttttcttcgttgcacatagttggccgcttctggcccttttctttcatcgctgatattccgacattcttttgggaatctactgatttgaggatcaagcagtgtttcttatgttgatgaaaatggtattctcgaggttttccttatgtatttctatcacggtccacaggcctttgtccatgagaagaataggattgagcctattttggtctatagcgcccttgaagtctctttaattctcatttttcaggaataaaatatatgagttatgtctctccgttctttttgggtcccagtaagcaacatcacctaagaaccgacaacctgcttcgcgtgggtatgtaggtataatttttgtagttgtgcatatgcagtgtgtaattagttgcaggcccggaaatgctgacagttccagactccatcttattcgtaagcagctcgaggtcaggagcacgtcatcccctatcagcttcacttctcttggatcccagcggcatcgatatctgcaggtacaagagaatacaacgaaaagtactgacaaatcccactatggtaagtctcaattgggatcttctcaacccttgaatcatcccagtcaaccccccagcaagctccagagacttccggacctccaggacccccggggccagctccgatttattattcagcgcggccttacctaatcgcctctgctgggaacgtcatggccctataaaaacccagcgcccctcattctacccctccaatcgaaatacttatatccactccagttcaagccttcatctcttcgttctacccccagaaccatctccggactttcttcgctactgaatcgatcgattcccgtccagcgcaccgctttccgacccttctcttcaacacctatcccacgcttcacgccttcttctctcaaaatgggtgtcactgctatcaccacgtaagtgcccagcttgactctcatacatacccgtggatcctggaaatatgttctacgcattcatcctggtcctttccatttcgcaaagtatgaaaacaccctagttaacactcctccttcttctccagtgccgaggagtacaagaccaaggtcactgatgccaccggcctcgttgtcgtcgacttccacgccacctggtgcggtccctgcaaggccatcgctcctaccctcgagaagctcagcgatgcccacaccaacgtcaagttctacaaggtcgacgtcgatgacctcgccgaggttgctgctgccaacgctgtctctgccatgcctaccttccgcttctacaagaatggtgaactcaatcaggaggtcaagggtgctaacccctccgccatccaggctggcctcaaggctatccttgcatagtttcggaaattgagattcattcttgttcatatcattgatctatgatcttttttttttttggagggttgggtgaattaattgaatcctgaatacgtaccgttccacaaaagtctgtgtctatgatgtaggctattcgtttgctttttcttctcaatcggttgtttgactttgcttggaagctaggtcggctatgcactgtgctttacatggtaaatatatgtacgtaattgaagaaaagagctacctggaacttgacttttgaattagaaaaaagaaagtgtctgtcctacagcttgcatgcagcttgcatgcagcttgacaatcaacccgcagtgaaattccccgcagtttctctatataacatcattggtgtttatatatgctgatcacttgagtccgaccacggtagcgtttcctccatttccatttcaatatcaaagtctgattggttccagattttgacatttatagatatatttaagacaaaaatagcaggctgcttatactgcattgtcctatttacttgttttgtttttgtggttctcaagttttataggtagacggtagaaaaagccggaaaaatgcataaattatgcaaacagaatttctgtgtacccaaatagcgtaagtcaaatgaatgtggatttgggattccggaacatccatctctgtactccgtaaatgagtgaggatatactaggtgtataacaagtttacaaatatgacaaacagctatagaaaaatggtcagtgtgtgaaagaaaaaccaagtttgaacttgaactgcatggcgcagatgcaaacaaccgagagaaggagttgtatctgtaggataggacgacaaacaattcaatggctgtctatataaagagtggttgtagcttttccatcatctccctttccatcatccatgtccatccacctcctgcttccttcaagccatgtcatcaaagtcttcaagtacggcgaccatggtcagtgagatgagtgacgaagatgagcgcccctcggaggcgtttgaatcggagaacttgtcataccgcaattactacccctcagaacatgatcagaccttcaatactattcaagagtatgcttcttcagtcatcaatttctgcgcatcgtcctcacgaccgatggacctcacattcacctccagggttgcgaagcaccttcagagaaactcggatttgtttgtgatgattgagtactacgatgaatgcgaccctctcggtactcttttcttagagtcatctcatcgagatatggcccaccatcgatgcgccaagctgggaatcggcatgctgaaggagttccagcattacgaaattgaggcaatccagtgggctttgaactgggctttcaacagagccggcctacatcgggtggagatgaatattccatcgtggaatatgcgactgggcaaggtgtgcgatgaggttgggtttcagatagagggaaaaaggcgggaatgttttttcaaggatggcgagtggcatgacgaagtgaacatgtccatgttgaagaaggactgggtgcaactccgggcctagacgaagaggtcgccatactgaaagtgcggtggtacaatggatacaatgcaggatgccttctatgattcaatgacaagtctgacctcgattcaattttgacttttctcatcaagtaatttcagtaagagtaagcgagagatagtttaaagagagaacgttgaagagacagaactgatgtataccaaatcctgcataggcggcttaacgtctagctatccccgaagccactataaagtcactgtgcacaaccacgacagtttctattacctatcatatttatgcatcatagccacgcgattgacaactgacagcaaccgttcgtgacttcggtccatttgcctcgatggagaatagtagatccatcacacccactgagcatgtctggagtaccaaggttgccatttagaacctatccactacatataagaaagcgggcaaagaggcgttcgacagtcaaagagtgtccaaccgagccgacgcggaaagcagatcgatcagatatttttggctgtgtttgcataaacctgctttgaccttggttcctatgattcatcgagggaaacggaaagaaagatacgccttcaatccgggaattaatttactttgtatatgcacatcttcaggaaggtgggactgcaggcccactctttttttaatctccttttgatctcttttcctgttcggatttcgccgaggcaaattttcttgtgttttaattggctgctagtcctgctatgatgcctttcatacaatatactttgaatttgcaagccgtgcgatccaggggcacatccgatcgccggcttgctcttattttgcttctggtttgagggttctcggtggcgttcccattgtccaaggaggctaatgtgatcgatcaatatctttaatatgttccgacgaacggtcgactatgtacggagtaccgaccgagcctggagtatgtatatcacaatatttaagagaggtccaaatgaacatcacagtgggccccgctcttctcacatctggcagctgaggtgcagctgaattcgcttattagctcggtccacggttccaacaattaatctaaatggaagctcaaaccgcagtgcctgggtaattctacggagcagtaaatctagtttccatggttgatacaaccccattatcggagttatatcaaacccaggcacggaaaagacatcctgtagataaataaagactaagatccgatgccattggcgttgtattagggctccgatacgctctgaagccaccccacatagctctttatccatacagatccgatctagatctgcccaaagcgaatcaacacgggaccaaggcatcggctgcaataccacatccaccaaatctaaagcgggctttgcgaccttgggatctaatttattagcatgaacttattctactaaaatcaggcctcggcattccctttctggattttttgctttgttttggtgtatgccacgcgagttgtgggtttaggataggtttaggatattacttgcaggccaatgaccctgtcggtggagatcacgtctagatcggacggggctcgatcgtggtacacgtcagttcatttgttaccgtggactagaggggcgcttgggatggctagtctaccctggtctaccctgatgttataagatgtttacctcgagccctgttctactgatttggactttgtgttatttgataacttttgttttgctctccacactgatactaggaagcgatttccatgtcgtcttgttgatattgattaatacagtcgcttccgactatcttaccctaccctccaactatacgtgctacttgccaatgtgccaataacgaaagaccaacacttattctctttctttcacaatgtcgacgacagacgataaaccggtcgtgcttgtcacgtacctggcggggtacatagttctttcctatgtgatcagcgcaatgggatgtgcaaccacactggagctgctccaccggcggacatcgaggtccggtctatacaattggtatgcccaaaaactctaccctaccaactcctgcacttgaacatgtaactaaccaaggaaaattaaaaggtaccttctcctaacctcgtcgatcacaatgggtggcattggaatttggtgtatgcacttcatcggcaaccgcgctatcgtcctgggcgacggccaggcagacgtgcaagtcttatataacgtggcttttacgggtacctcattcgtgctccccgtggtagtactgctatttgcattctacgctgtgggcgtcgaagagaaggccggctatcttcgcatcctcatcggaggcttgctcactggtagctctgtctgcggtatgcactacatcggtcaactcggaatctcgaactatagatgctcctatcacgtcgccaatgtcgtgggctcggcgatcattgctattttctccagtactgctgccctaggcatcttcttccgctggagggctacctggactgatagctggtggagacgaggaatctgtgcttgcttattggcggttgccgtctctggcatgcattggaccgcggccgttggaactgtctacaaggaccacaaccgcatggtcatgaagggaacccagttgtcgaggagtcaggttgtcattgtctgcactgttctggtatgcttgcgattgctttgaagatatgggggattggaaactgacagctctctaggcctgtgttgcatgtgtagtgttgtcgatgtgcgctgttatcgctgggcgaaatcgcagaaagtcgacgactcgtgcccatcagcttgtccttgcctgtgcctactttgatcccactggacgaatcatggttacaacgcaggctctgcttcctacgagaaagattgttgatcattatatcggacgggtatgtccctgagccaccggatacagcagaagtcttgactaacgaattacgaactagacattcaaagatgacgacctcacccggactcaccctacattcctgtgggcatttagggcaactcgaaattggcccgttgtgaaagatctagtacccttcatgcgaaaccgccttgattccgaagaaagtgccattgagaaacacatgctatcgcgcggagtgtttatggacaaggatacggagttgcaaactgattttgataccttgttcaagcaactcttctgtgtcacagcccaagagctctcggatgaactgaatctgcctctccaggacctaggaacactctacgacgatgttctctctactgctatccccgtctcccgactttctcgagccatgggccgctcttcgctccgcactggcaagggtcaattgatgttcactgttcgccagctacaaaaacatgaagcagcacgcttgaggtcacagggattccgattcgcaaccatcgagcatgtcaccggaatgctttcccgacgcatccatgttcccgaagcaaacctagccaactccctccgcgatatgcgagactacgcaagctcgaatcgtggctttgacgagggagtacacctcatatccttcatgatgcgcccaacaatccacgatcacttcgagatcctcaccgcaaagggtgtcggcaaccccctcccatccgcaaccctccccataaaacacctcgaaatccaccatctagaactcatatcccacatggaaggctggtccatggacacatgcatgcgatacctccagtcagccagcgcagggcaagccttccccaacctggacgacttccgcgccgagttcatccaggccatcatttctctctcgaaaaccatcccagaagacctgcgcgcagcagcgcaactttccgctcgcccattatcagcgccctgccgcagcagatcccccaaccccgaaatagcagtacagaaaacctgcaccctcataaccttctgcgtcgtcggcacgctcgaaactcaagtctccaacccagactacaccttcacacccttccgtctcttccgcgtccagcaacagataaacgaagccctcaccgaccgtgacgatttcgcccgcgaactaggcgacgaactcttctgcacagacgtgcgctcgggatcgaccaccagcgagagcccttccacggctaaactggccatcttgcgtctgtggccgtcacgcaagcgctcggcgaccttgagctcgcaatactcccaggagtcgtttgcggatcctactgcgactgcgttgcgggatatcactgttcgcagggaggttcgcgttgattttacccacctccatgagaaatcaaatcataatgtcagtgcccgggaaacaaaggtggttgttaccggtggtggtgagaatgcgcctacgacttatgtcgatgagttgtatagtctttgctatgcaccgggtatccggatgagacctgatgcgtcgttgcaaaatatttcgcgtggatcgactgcatgctgatgacttttctttatggtttgatttcttttgcgttatggctggcgtgagttggaatgtatacgggaattgggactggtcttttatgatttgttatgtctatgcttttcgtgggatggtttaggattgtatataattttctctttctgacgagtatatagatgatatcaatacaaacgcatgcatgtttcatgtgtaatttcagcttttccaaagtcttattatcaataaacagccaaaatagtatttgtcaacacatgagatgaactctagtaggtcacagagaaaaagcagaatatcgtcacacatcaagaatagactcgttaaccaatacatgcaagagatgtcatgtactcattacttcgcacctgccgagagcgagtcaggaacaaatgcagtctgaaaagaagcactggccaatcaattgaagatcctccaatccaatgcccatacactatagagcacagatcccacggatcaggcatcaattagcattaggatcctcgcgctccaagaacgaaggatctgcctcaatgcggcgctcgaacttcgcccaccaattctggaagctcttcagcggcacgacatcctgaccattttcattctccgcaaagctagcgaggaaattaaacgcgttcccaataatgcgctgcgccagcagcttcgtcgagatctgcttctgcgccggagattgcgaaaccaacgccatagacgttctacccgatgggcgctccgattccagggaggcaagctgcggcgcgatattctgcgcttcttcgatcgaaatgcccagtgtcatgacgcccgttacagcagtgtcctcgtcgagcatgtcatcttcttcctcggcttccgagcggcggggagcacgaccttgtggacgcacggtgaagatgcctgagggcttttcgtttgccaatgcgcccacgaagcggaagtcggagggttcgccggtggtcgggtctgggagttgggcgtagattgcggcgccggtgtttggtgggagggttgctcctggtagcataaagacaactatgtcgctgagagatgcactgattgggattgtgaaggcaaatttggttgcttgcccgttcaaatggctgtctactgcaatgatgtctgttagacacgggcggcctgggaccacgacggagaacatgatgtgtggtggtagggtttggacgagctggaggcagcttgagtagctggtaaagcggaaattggcaaggtgaactgcgatcaatattacttccgttcttgaagcttctttaagcttctcgatgatgaaatgacataagaggggctgcccttatcggccggtcgataagggtttggcttggctaaacaaaggtctggttctcagtatatcgaccttcgacttttactttgccatcgggttcagcttctgtctttagaagtcattatgggcaaatccaatttagacctggtcggcgaatgcgataagtaaagctgtcccaactcggtttctctcaattcgcgttttctcttacaccccaccccgcagcttcccctactacgaggatgatcgcgacgtctacacggagaacctgaagaactatcatgcattcaaagtctccggatacgactgtacactcggttatattctcaatgcagtcgttgagaaatttccctggtcggaaaagagctgggccattgactcgactgcgcagaccgtgacgctagtgacaccggagggagccaccccggcacaccggagcaagctcgtcgcagcagacatagccgaagccgtgaaacaaaaaaagttcgaagtgctgcaaggctggcgcaacgagacctacgcagtctacggcccgggcggagaattcctactcgagatggagcgcgctgcgaccccactcttcggcatcgtatcctacggcgcccatcttacgggctacgttcaggatgaatccggtatcaagatctgggtcccacgccgcgcaaagaacaagcagacctacccaagcctccttgataacaccgtcgccggcggtatgtgcaccggcgagacgccgtttgagtgtatagtccgcgaagctatggaagaggcatccttgcccgagtcggtggtgcgcgctgcgactgtctccgtgggctgtgttacgtactcacatgtacgggatgtacgagcgggcggcgagacgggcctcattcagcctgagattgaatatgtatacgagctcaggcttgaccctgaaactaccccgaaacctggggataatgaggtcgaggaattcaagttgttgtcgattccggaggtgcaggcggctttggcgcgcggcgagttcaagcccaattgtgctaatatcatgattgatttctttgtgaggcatgggctgctgacgccagagaatgagccggatttcttgcagattgttgctagattgcatcgtcgcttagaatacccgactgcttcgcattgcgcaaggtagattatttgtttgattgcttgagacatgtgtcagataaggcgaactaagatatatcaaatcaatttcaatcgtgtgggttccttccgcatttgcacagccaaggcagttatttgcaagactatgaaatgattcgatagaagcatggtcacaaccgcactgacatcgactgttgtaagacgaagaagatgaaaatgagccgccaaagtcagatctgttgggtttttgagtcctgatcgcaaagccaggaaagggataggcactgtgcggctgccagaaattacagctctatgcagactcagcccgccaggagacgcattttcattatcgaacggtcaatgttcatctcgtcgatcccatgaaaatcatgattgttatgataatctattggtattcccaaatcaaaatgcaaagaacgcctgcgctgcaccccataagaacgatatgaacatcggtccggcttaaatacaccgacttttcccccattcgggctttgcctcaagatcaatccaagatccatctcatcctatgccaaggtcgtaagcaaaaaaagagagttccaacaatcgtaagcttatttcttaagcagcaagtacacgtgatcgattctcaacggagcaagctttttgtaaggtccttccaggtagagcagaagacctccaaaggacacaaagacagccctagaaatgtagacgttagtttccgcaagagccaacacaccagtaacgaaactcacatggtatccttagtggcaccctcctcgaagcggtacaccttgccgtggcaaacataatcgtagtcatccgctagggtctgatcacccatgctgacctccctccagctggcgcgggtgtcctccttgccgtcaagagagagagtcgaggccagagcgagggacagcgactcgccgaccgcgcatgggtacaactcagtgttcacatccagggtaaaggtgagggaagcatcgttcgagttgcaggtaagacgggagacgcggtcatacttctgggcgttgatcgaggtgatcgtgaaggtgtcttcgaagaggagcgggtcggacatgatgaaggttgcgaccgctgtgttttcggtctatggatggggtttttggtagagcgggttatgcgcagattatcgcacacaaattatcgtaggttcaaaaggccacaatggctagttggtggtccaagagtggtgaagagaagagttggagtcggagatggagaggttgatcggagaattgaagctttttttttctgccgccatttggtcccgccgataacgatttcgttggtttgacatcagctcgttatagctctactagatttcttccctagattgaacttatccgccatgtcctttcgcaagcgaaacataagtctttctcctggagttgaccgcaacgctgttcccaatgctactgcacaccccgctgcgccagttagcacgccaggcattcgcccctcccccgatgatggacggccaacaacatcgacagggactcgctctctagataatcttcttgcaggccatgcagggcttccaatggggaaaattttgttggttgaagaaaacggaactacggattttgcgggcgcattgctgcgttactatgcggctgagggcgtaatccaagagcagaaggttcatgtgattggagtgccagaacaatggggccgaagcttgcctggtctgatcggctcggtggagtccctggacgagaagagatccgacaggcgcaaggatgatcgtatgaaaattgcatggcgatacgagcgattgggcgagtttggagcagtcgctggttcgcgggatggtgagtattggaacaaaacattgcttctagcttcaatatgctgatcaatatagcccctaataatcacggggaacaagatgcagcagcaaaagaagcacccgctttctgtcatgccttcgatctcacgaaacgtctcacccatccgtctatcacaaacatgtccttcatcccacttatgccctcaagagagtcaccattcctcgctatccttaaacgactccagaccgaaatcacgtccagcgccaatacaatccaccgtatcgtcattccttctctgctcaaccccacaatttacccgccgaacgcctgccaacccgaacatgtactccagttcttccacgccctaaaggcgctgatgagtgcgcacggcacccgcgtgaccgcaatgatcaccatgcctctgtctctctacccccgctcatccgggctggttcgctggatcgaactactcagcgatggcgtcattgagctctgtcccttcccgcactctgcggatgccatggctacctcgggagcggcgacctcacaagaagagccaccgcagggtatgcttaagacacatcgtcttccagtattgcatgagcgtgggggtggaagtgaccagaatgttggacaggattgggcgtttattctgagccgccggcgattcgagattaaaccgttcagtctgccaccggcggaaggagacacagaagcgcaagatgcgtcggctccaggcggaatgcccaagaaatctgatctcgaattctgagactctttatgattggtgtgattccctagactcaatcgtcctcctcgaagcgtcgttgggtccctggttctgctagcatatcgtccatctcgatctgctcggacatagcaggaccagagttggccattgtgcggagatagctcgctccatatccgtccaatactggtcgcacggaacggaggcgattccccaagcaggatgaagctgcaagccatgctgttcgtgttagtaatgcgatcgggagtaagaaaggatgctgcgcgatactgaccaacaaagagtatcaggggtgcaaagaataccaggaatatcagcagtaaaaaacccatgatgccttagtatagaacaaaatactcaacgaatgccaatgaagatgatgataaacacgacagcgatgctcagcagttcgcttgccaagatgactattcctaaagtggactagtgtgtaaactgggcttttccttttctttttttttttgggcgttcgtttcttctctccttcaatcaaccctggctttgctggtcaaacccaaagacaactccgggagtttgatcatgttctcgacactttgttaattctctaatggtaagcttcatcctcgtctctcccacacccccaactcgcatgattatttaactacaatctgtcaatcccctgaagctctttgatacgtcactgagtgcttgctgagaaacgtactggaaaatgaatcgcgataccccaatttaccttgctggcaacctgtatctttacatattggacaagcgctaactgtccttgccacagaatcattgaaaatttttccacaaatctcaaatcagaaagaaaaaaatatggatttccaaccagaccttcctatcccgatctcctatgtatccggtagatacctgttgttctcaattgacgccgtgacatacctgcgacgtgagcatcacatatgcggtgtgctcattgggacgctgcctcagatccctcagcagaatgtcttcctgggtctccctctgcagctgatgccagaagaggcacggctcttagtggataagggtgtagcttgcatcgtagacgaagccaaggcacacgacggcatgaacaccctcttagaagaggatcgcagacggtacctccgcgacctcgaatctcaaggccagcatatctcgcgcatccaattggatcgcaaagagcgcaaccgggagcagacattgaaaaaattagaagaaaagaaagcaaaggcgaaggctaaagccagtgctgctgccgcccagacacctacggttcctgaggtcacttccaccccgtcgccgaagaacgctgctatcgttgacctcttcaacgcagaggatcgcccatcgtctccatcgaccgcctcgacgagcacacttcctcagagcgcaacggtcattaccccggcaacatcttacccgccccttctcacgcctccaccatcgagccatcttccagcacccgcggtgccaccctcctatcctctcttcgcccacctccactccaaaggatactttctctcccccggcctgcgcttcgggtgccagtacacggcttacccgggtgatccgttgcgcttccactcgcacttcctcgtggtgtcctacgactgggaccaacatattgatctgatggatctcgttgtcggcggcagattgggcactggtgtgaagaagggcttcttgatcggcggagcacagaaaggaatcgatgaggtggattcggaggctgatcgtgtgggtactgtgcgggctttcagtcttgaatgggctggaatgtgagggatgaaggacgtgaagggtttcatacccttcatttgtttttatttcccatctaccaggcttgtgggtttggtttttccttgcaaggattccatggctcatgcgccacgctgccgggtcgtccttgcctgtccccgggtacctggaaccaggtgcccgaatttctactgtacctggtctcattgagcccagggaagaaatacgtctattggcgatttggaccatcaccgagcataaagatacagatggtatcctcactccaaaggaggtctaccatgactccgccttctagcgactcaggtcggaggcttggaaaggcaaacagtacgtggttaagaagggtcgtcaagtctctggtcaaaccatacgttgcccgactcaaattagcatgtcatatgatcacgatcacaaaaaaatgttcatcgaatgacgtctacactttacagtgattttctggtaaatctgtagtatcatgtcacagttatgaatgatatgcttcgcctgttgaagacaactagccaacccatcggggataaagggtattccaccatgaccaaaatcattccaattgaccgtcttttcgggtcacttcatagattcgagctgaaacctcgtgttcggtgctctttcctttgtctgaattatgtatgcctttccgcgtttgggtgccacattgcgcactgtaatatcatgcagtagacatgatgaaagaagaacgagtctaacttcatagaacaccggcatgcctcctcagattatgactgtgaagctcgaatctcaaagactctcagcagtatcagcttttatggcaggagcgcacctgcgccgctcgagtccgcttcacagctaagcagtcaattctgtcggtagtaaattgggaagaaccgtagaatggccaccgtctcaaatgtaatcgatgttcctccacttgaatttcttattggctctgtccacaggacgattctcgaactggtttccatgcagctcgaaaaccaacggcataggagcttttacatcagactgagtctgctgatccttcgcgccctcggacggcgttggcacaggcactgtgaaccggaagatagtgtgctccttcggtatagctgtagaaacaaaacaaagtcagcatgatcccagtatcgcacctcccactccaaaaatcaaactcactcttcatctcgtccttttcggtgacaatgacgaacgtaaacttcgtatcccgcaccacaatccccttagcaccaaccctcccagtacatcgactcctgacaacctcgaccgcagccccatggtaatccgcactgacaagcttgcttccatgagacgccggcgaaacatggccatgtggtccagccttcacatccaggatctcctgcatatacccgacccacagctcatgtaggcccttgaagatggcgtatttgcattcttccttgggtaggttgtacagtcctgacttgcgcttttcgcgcgctgacagcggttgtggcttctggtgtcggagaaagtattctttcttgcgtagacgctcgagacgacgccgggagcggttatcggatgctgagggggaggttgcgcggaggaagagtggtttctgtttgatgcgctcggtgaattgttgcgttgcgctgtctggggagtgggcgcgtgagagaagggtgtgcgcgatgtgggtcttgggggctggggaagaagccattttgtgttatcttggatgtgtggctccaggggatgcgaaggtgtggttgttggaggttggagaaaaattatttgatgtcacacaccgataagataacgcaggtcatgtatagttcgaaggtatggaaggtataaacaaccactttattcacattattagaatgattcaagtctattttctataagattatcctcggatattggaatatttcagtgattaggtttcggacgtccctcggctcattgatgcttccccgcataaatcatctttgaggtgatatatatctcacgcattaaaatgacacaatacctgcaacaacctattgagataattattgtctaatattgactccttcaaatctgcttacatcaacatgcagtctcagatcgatcaaaaggacatccccagcaacttcccggggattccagccttcccagatgacgtctctacagcaccccttcttcgactatcgtcgggaaagctgttagcaggtgaccatactgagcaagagagactgtttcaagcatctacagacattgggttcttttatctcgatttatcagactcaaagagaggcttatcactcctcggcgatgcagacaatctgttccaagttggcaagagactatttgagctgagtctcgaggagaaaaaacagtatgatttcagcgcacagaattcttactttggttacaaagcgcagggagctatggtggttgacaagcaggggaatccggaccggaacgagttctacaatgtacgtcagcaccgaacacacccacctggacgttcacggtagctgacacaactatccataggtttccaaagacgatattttgggagtcagtgatccgctacccgctccagagaccctgcataaaagccgagctcgattggaatcattcatgcaaggctcacatgcaatcgtaaccctaattctggacatcctgaacgataaacttgccctaccaaagaacacactatccaatatgcaccgactgcgaactgtaagcggtgaccaggtccgatttatcaaagcccctccacagccattagacgacagacgtaccgcgctaggccagcataccgactttggaagcgtgacggtgcttttcaaccgactgggaggactacaagtgctaccgcccggtgccgatgccgaatgggtttatgtcagaccgcttcctggtcatgctattgtcaacctcggggatgcaatggtcaagtttacgaatgggctgtttcggtctaacattcaccgggtcgtggcgccaccggggctccaggctgagtcgacgcggtacagtctcgtgtactttgcacgtcccgaggatagtgtgatgttgcgtcggttggaggaatctgatcggattcctgttatggaggatggtcagactgaagaggtgatcaatagcaaggactggattattcggcgggctctgggtcgtcgggtggaccgtgttgatgatcttgactatgagaagtctgcagggacggagcagctgagtcggaggatcaaggcttagcattgttctaggttgttttgagaatagtgtgaagcttgaaatagattacgctttgcaagtaatacgtcaatctcggcacttgaaaaaaggggatagccatgtgatgtatagccatgggagagagccagtctaatcattcgatggtcttacaactatacgaaaacggcgaggcctatgacttcgccctcacgttttctcaatcgggaaggtacactatcgtgagtattgtttccccttgaaaatatgtaacacccctgaaattcatcaatcgtacccgtggacgtcaatatatattaccgataaaaaaaagcttaaacgataggtctgaccaggggcaaagccgaatccaccaagcccaagagatactacggagcatactacactactttaggaaggagattctactctaaatcagccttctgagctatgaagacaaagtttaagtagattaaggaaaatatacccttcgaacgggcggttagaatctcaccaagacttgacagctccgattcttgaatccgacactttggtaaagataatccagttcggtggggagaatctagattccgaaaacccttcgtgtctcagcgatacgtgcattggtagaaacaaaagcgtatggagtattccgtatccctcttcgatatcagctgatgtgcaatgcgacacattataccccgtatattattctagaatacgatagttatacgatgtactccgtaccccgtagtgcaatccaacatgggcattgacgtgtcaggatctagatgtagtaaatgatctaaccccattgaattggctacatattgacataaggctggcactcggcaaacctgcactctccgacatgacagcctgttctcatatctgtcgatcacaggacctcacatttaatcgctcatatacgaagtacccggaacagcagtgatgcagtgacagcgggtcaatatttttttttgcctcgcgtctcgaccagctggcgctttttcagctacggagtagagcacagaagaccaaaatagcttcttgattgagttagttgaccgttaagatggatccccggccacactacgaatcacattgtgagcgaaaaaaagggcccccgctcaatttccggcgctctggacctgggttgtccacccttactccgaaccgcccactttagttaccccctgacttgttagctttgtcctctgtgcatattaggtactccgtacttttgactagaccctcagtacggagtaaagtacggagtacggagtagacggtgtccagacctcgggatttgataaaataaacgacccaacaatctggatattctgcaataatgcgttatgacagcgggtgacccttccgtctccgggctttcgggtttatgccctgtcgaatccttccctgcagtagtctacatatgttgtactcggctactggtaattacaaacgagggatctctagaactagacaggcataggtaagataggtgacaggggtatggtacttttgttaaggaaaaagcaaaaacatattgtatagatcttgaaccgagccatttaaagatgtctgaatgagcaagcttctccgtgtccttaaacgacatcaattaaaacacgatccaccaacattcctcgagaccacaacaggaaatccaccgaactcaaagccccagaaatcgggagagaaagggctatgggtgacttctccgcgccaataactaatgccctatacgccgtcgtcttcgacccaccgcacggagtactccgtacattattacggcctgactccgttctaaattattgatattttacaaccatacatcgcacggagtaccagctatgtggtaatctccgtcaaagctatgcaccctcaactggatccattgtttcaatataaaaataataaaaaggctcggaccgttcgaacggaaccacacgggctgtgttgcccatctgcccatctacccaccctgcccaagtccccaaatcttactgtaccgaggtttcatggtacgatgtatgttgtcctcggccgaaagcgcccttccatctgaggtgcgtctacggaagagttccggtttgtgctcagcttctgtggcgtcgtggcacccacatcatttgacaagaccccgtaaagatcggggaaatatgcctctagaatggatttggaatcatccaaatgggcgccagataaacggtagaaggcagaaagacacgatgtacgatgtacgatgtactaaacgaggcaattacacatgcatatccccactgtgtggcatgacgtaggaaattactaatgtggaccagtccggtgaattaggaataaacgccgttgggagatgcgggtcggttggtgcagcggtcctctttgggggctttctgtacttaagctattgcgtctggctatccgaggaaatggaaactgggtctgtagtctggtttagtccctgttggggattcccgccgagtttcatgttccgacatgcgcaaatcaagccatacgtttatatgcttacaacgtactccgtagtggatgatggtgtgttgtatacgatatgcacgtccgcccccggccgtcatggaaatgtacacatcatcgggattcgtacgggtgcgcacgcgcaggcatgtgtagtagaacgaggcgttgggaattccctggagctgatctcgattggagatatagtcggtttgaatgtatagaagttaatgccatactatatatgtatgttatatggcatataaaaataagcatgctatcgggatgaatcgagttgaaagcagtacgaataacgcaagagaaaccagtggcagatatcataaaggattgtaatggtcggttgtaaagagaaatcgagtagacagcgtcgtatgttccaagctcaagctgctgattcagcaacgtctggtgttcgttcaagcgccatagctgctagcttctcttcaagacttttgagaacctccgggcttgtttctggtttcacccttttaggtctgaaagaaagaaattgaatgttagcaagaaaatcctataccacatgttgtagggttgagacacgtacggaattcgtatagtttcatcacacttcgcctgaccacaattcaaacatgtttttgcattaccctggaaccaagtctcacaaacatgacactgataatggactctgcgacgaggcttcttgaacgtgcgctcgggtctaggcttgggcggatcagcatcgcccggatatccatcgggatatttatcgagtttggccgggtctcgcgggcatatcttgcagcgcacatggctgcaactcgggcattccttggtgccgggggtaaagagcgaggcgcagaggtgacagttccgacggacccgctggcgcaccggccgacggacgaaatccggaccgccggtgggcgacggcatcttgagcgaaatttcccgggtggtgctgagcttgaggtgcgtggtcctggggaacagatggggtgaatgggcgtatgtctccgggttcttggacttgcgggttgtcggctcgctatccttgctatccttgttgcgggcggatgggtgtcgggggcactttgtgcagcgggtgtgctggcagttgacgcatactttctctgcgccgaaggtggtttcgcagcggtggcaggtacggcgcactcgcatgcggattggcttcgttacacgggttagctggaggtcggggggtgcgttccagtcgctggtgtcgacggtcaggccatatttagcgaagaggctgcgcgccttttcctgttgagttctgctgtagctggtgaacatgaccggtcctgatgggctgggctcttgggctggtgccggtgccggtgctggtgttgctgctggtactgatgccggtgccggtgatgttgcctccggtgcactatatttagtcaagactagtcagcatagtgttgaagtagaataatgtcgtatatcgtacgtggtttcggcttgagtggctaccccaggagtgatagattgtcgtttggacattgaccgaggacggaggacggtcttcatacgcttaaggtatttcgaaaagccctcgggcttgtcttcagggcggtcatgttgagacatggttcaattgaagaaatggtgatatccagagtgtgggaactcattccatacgaaatatgtccagtgtgaaggatgtcagagtggactgatggtaagatccaaaagttggcagggaaaagtaggggcaacccaattattatagagaaggaatcaggaatcagactataatacaagagtattgtataacaattgtataaaaaaaggcccaaagctcagacgtggggattccgatactgtggttctgtggattcggatggtttgggatgctattgaatattcgatgttttattttatttcacttcctctgcttgaaaatgcatttaaaggctttattttatattttattgggtttttcttcgggttttcataggtacaaaggaggagtactatttctccggtcacaattggcagatacttaggcgaaggtgtttctccatactaaccactatagggaggtaccgaggaccaagtaccgatgaccaggtaagccctggtaactccgacgtctcctatttagtctctgatgtgcatccccactcttcctcctccaacccggtgccacttcgacgagaaaaggctttggtctcgaaactctgtggcttcaggagattatctccataagtcatatccgagaatagcgtgccatttcgctggtcttccggcacatcagacatggggccccctgtctcttggcacgccattggttcctctgctttcccgtcttggactggcctatcttcacactggttgacgtttatgtttcgtcaggctccgtacaaaagtacgtactccgtacaaagtacactcctgtcgccttccacggcggtcaaccgatggcgtggcatacaatagtattttggagccaaagggtgggccgggggaccgggaaggagtggtatctgtgctccagctggcctccctacggcagcacccgccatcccggctgcctttccagaaacagctaacttgctggtctatcagtggaagcggatcggggaagaaatagttgaggggcacacaggtgatgagcgtgccttcaatctcttcgttattgcggtcgatcaggaggtttgcgagaattgaattcctttcccttacaacgggaattgaactgccggggaggtgccgagcggatagagttttctctacacggtctttgtgtactttgtatagtaattgtacgatgtagttacatcgtacaacatacaacaatgcattgttactggttggagataaatactccgcacctagatactcggtatatgtaacccattgttctattgatctacaggtagtgctctttatagtgctgactggattattggtttctgggactgtgaagaagtctatgcagaatccagaagcccatgcagaatctctctagcatcgaagggtggcgaaagaaagaacctttgacacacgggcatatctccgacgattggatcagaagaggccatgcatgatgcatgacacggggatcccaaagggcaaagtaaaagtataaatacgagcagttcgtcgatttacgacgcactccgcgatgaaatccaatagcgatcaaataaaaaggaaaagtgctagatatgagggtatgcacgacgtcttcaaatgtaactcaactgttgatcacccctttttggaattttgaggcgattgtcctcagccatgtcatttttgaataccgcaatgaaaattattctacaacccaaggtgggaaacacgagattatactacaatatttttcctacaaaattagtagagccagccccctgggaaataaaagggcaaatgattaaggaaataatttcgcttagtgggcttgagggacgggtgagagtggaggtcggatggtcccagtgccctggtgctgtacggagtatagccgtaaagtacgtactggctaatcttccaagttggataagatattgatgctaatattacttgttatgtatgtagtctggatgccaattgaatagatacttggcaagactctacggtcgtataggatacttcttgtacttgtttatcccggtttctgcatggcctgtcccatgagtacggaagtatagacctgcacagttggcccgcatatgctgtgtgctgtatgctgtatagtataaactgtagcccagaatattagtctcatctgacacaagagcatacaagagtactccacactcaggtatgttaatgatgctctacaactttacattgggcctgtattcttctggcctatctggattctggataccttgccgccgccccccccccccccccccnnnnnnnnnnnnnnnnnnnnnnnnnnnnnnnnnnnnnnnnnnnnnnnnnnnnnnnnnnnnnnnnnnnnnnnnnnnnnnnnnnnnnnnnnnnnnnnnnnnnnnnnnnnnnnnnnnnnnnnnnnnnnnnnnnnnnnnnnnnnnnnnnnnnnttgatacccttcccccccccccccccccccccttcgcgtactgctacatagtacctacatatcactgttccaaatattgtgcattctttttcaaagtctttttagatgtcttactgggccccgagggaaacgcggatgacacgcccgcgttgccaccgccattccatttgccaaatcattgcggtcttttgtactatccttttactactggattgcgtgaactatatatgtatcgatatgaagatcactatatggcgctgaaattatcggagttgaagacaatagaagcaatgtatctgcaaacatcgtaaaatatcttgattttttcacgtgtagtagaccacatctcgacaagatatgaactcctagatcatacgagctgcacatacaacatacagcaaatccaccgaccaaattctagctaaacaagaaaagcagtttagtgaacagtggagagcaagcacatctcgtagtgggcgatcacatttggagggggaccaatcaaccacagccgtttatattgcatgtccacttcaatcggcatgttgcaagaaaatagggacaaaccgccaattgtatcaatcaaaagacccagaatccttttcaacggccacacacggcgggaccagcggagtcatacgagcgtatgaactagacagtcatcggctcctaaatctggtgagatcgaaaggcttttgcgctggatagctgggttgagtccctagtgagcactaggtcagccgggctttttatccgtggctggcggtgatcgatggcttagctggagaggggcagagccagctcccctgggcaggaggactgactattcgtgaatggatagtaatgacgaccaaaaccattacaagcgttcttttatcaagccataggccgtacagcgtcaattgacatataacatctgccggctgagccagataagaatcggcatgaccgaatgacaggccttggccattctaggaaacgcaacatagctatctgatatttgagagttcataactcgtgagatctaccactagcttggttatacgaactgtaccttgaaaatcatccggctgatagatcacaaacctcgttcttgggactatgcccctacatgatcgacgcgagcttgaaatcccggcaatcaggttggtctagcagccaattgcatatcagatttgaattccagaagtgtgtgcatttacaagccaataggatacagccaatccgcaaaaaaaccaaaaagcaaaacgccctttatacaaaacccacgccttgggtatatgctcaatccaccgaaggacatgctctccaatcaaaagacgatttgactagccgatgcggcttaatccgacccggtcagcttggacttgatgttgatgatatcttcatcggcctccacctcaatcactcggttgacttgggcactgctgcgcatcagctccactgcatttgcatacgacatgcgttgcatcgggttgcagttctcagggagccagtagaggagaacgtaagggaccgagggacggccgtctctctatatctcattagtacgtgaggcctgcattattgatggacgacttacggtagtcattgggtggctgaggagaatgaaccgcggcgaggattcgggaagatcatcggccagatcttccatcttggagtagacttcattgtcttgcggccggatttcttgagtctttgtatcaatcatatctatttgcgtgatacgtcagcttcggacgcaggcaatgtatggttatggctggcactatctacgtgctatatagcccgcctggtctcgaaatgtatggcaggtgtgggaaagcgcagagttaggggcccgtacagatgatagcttgcgcatccttggctctcgatgtgcccagacgaaacttgcgcagcttctccttagtctcgggcgagaacgaatatagtcgtgaatcagactactaaagttagcatctgatgggggaaactttcgcctggccgacctggtgccctggtgcggggagacatctcaccattttggacgtcaactgtgggacacgcagagaagtcaagtaaacgaaagttctcagcctagcgctaataatgcactgtataaagatgataccggtatgtccgacctgaaaaaggagaagactgtaggaatgtgaggcgagacgatggaaatgcgggcggagtttccctgttcccccacctcaatccctccacgctttgaacaatctagacattactcctccacctatatcttcatgctcaaccgattgaatctactgacgcggcacttatcacgcccattcagtccctctcgtcctataagcccctccttctcggccccttccctggccgctcgctcaggtctatccgcgatgacatcagccgtgcacccgaagctcatccacacggcagcatgcctcattatcggcgatgaggttctcggcggaaaggtagtttgagatatcgataggctccccgtgaacagaacatatattctgacattatcgacccttagaccgttgacaccaactcggcattcctagccaagttctgcttctcgctcggcatcgacctgaagcgaatcgaggttatccccgatgatgaagatgacatagtcgaagctgtacgacgcatgagctcccgctatgacttcgtcgtgaccagcggcggaattgggcccacgtgtgtccaaccccgtccctagtttccccgagcgatgccgacagcacgcaagcaacgcagcgcttcatacaaagcctagctaacacatgtcccccatttacagacacgacgacatcacatactcttcaatcgccaaggcattcgacctgaagctggaattgcaccaggcggccttcgagcgcatgaagcgcctctccaagccccaccccttgcaacagaacttcgactgggagacaccatcgccaggactgaccgccaagctgcgcatggtcgagctgcccttcgacccgaagatccccgctgagtcacaggccgtgttcgtcgccgatgacctgtgggtgccgatcgcggtggtgaacggcaacgtgcacatcctgcccggcgtgccgcggctcttcgagcgcctgctgcttagcttgaagccctctcttattccccgtttgaccgacccggaaggcaaggggacgttccgcttgttgttcagcacgccgttgcctgagagtgcggtcgcgccatatctgactgagttggcggctagggttaaggctcggggggtcaaggttggcagctatccgcgttggggtaaaaagcgcaatactgttactttggtcggggcggataaggcttacatggattccttggccagtgaggttgcggagaatgtgcagggtacgctggttgccacggaagatgagctggattgtccgtccgacgaggaccgtgtttacagtcagtagattatttattacatagttgtctagattgactgcgacttgaaatacatgcagcacatagagcctaccaaatatatattagtgtcaaacatggctatcttgaccaggttagattatcaaccttgatatatcaaagcagtagccgtaggaaccagatcataaattgcgatcgagaataggcggtatatcatacgcagagcattcgagagtagatagaacgatctagatactagacaacctcaaaaacaaaggtacaggccgcaatgatggaagcaaggcatccaccttgctatgaaagaacatatattgacagccgtgtcgcctcacgagagcgacaaggataatgataataagaggcgatagataacaaacaccagggatctttcgcaaagacttcgacagtaaaaagacaataaatagggattaaaacatcgcaatcggacaacaaaaggggaatcaaaaatgtttcgtgagacgaggttgggcgtcaaggtcggcagtcatcaagaatgcgagtccattgaagaacccacaaacatccgtaacacaaacgacaatgccacttcttctttggtaatttttttctggtttggtttgttttctgttcgaggttgcaagctttcgttttgcagtctctgtattgtttcccatttagatctgagtggcgggttattgcagattaaggccatccaaaggtaaacaagatatccaacttttccaagggcaggtgggtgttcaccacatgctcggacatataaatccacccccgtaactcttcccgacattgtgtgctgcgtatttcggattcgggggttgtttcgagatctgccggcatcgcaacgattcggatcattttggtaggttggtgttttttttacatgatgacgcaactcgcgcagcaaccagcgctctcgcctggctcggccacgtccatcttgccctcgggtgcgcgggcgccgaacgcgccggagccggaggggtacgaggacatttccttgttgtagcgacggatctcgcggacgaggtcgtagaaggcgttctcgacgttgatacgggacttggcggaggtttcgatgaacttgcagccgaactgacgggcgagcgcttcgccctctgtacgcggtgaatgttagtttcggggttcggatttaggtttccagagagttcaagcggagagttcagggtaatggaaacatacctgcctcggagaccacacgctccttttccaaatcacacttgttggcaacaacaatgatggggaagtaatccttgtccttgacgcgcaggatttgctgttggaaggtcatgatttcttcgaaggattggcgtgatgtaatggagtagatgagcaggaatccctcgccggttcgcatgtattgttctcgcatagccgagtattcctcctggcctgctgtatccaggacatccaacaaagcgacttcatcatcgatcacacactgcttgcggtaggaatctgtaggcggaagaaggttccgaattagccatgctgttcaaccagggcccggcaccgctggggaaaagcgataggacccgcgcggttgataaaatgggttgaggggggacgtcgaagtgctcaccttcaattgttggatcgtactcgtccacgaagtggctctggatcagctggatggtcaaacaggacttgccgacaccaccaccgccgacgaccaccagcttgtattctcttaggaactgttggagacggggttagccatttggaatgaccaaaacaagtcggatccggcacattggatcaccatctcacctttgaagccattatgagttagtctcagggaagatgaaacagaaaagagatattaagccgatcagaaaggaatcggacaatttaaagcgaaatccacctgggtcgtttaagaaaaaaacaaaaggagaattagggggagagttcggaggttggaactggcgggaagaaataaatggagaaaaccagcgagcttcgaagatttggcgaattcgttcaaatccgtctggggtaaacaaaaggatttaaaatcaaacacaaagagatcttgttcccttttttttttctagagaagacagaatcgaaagaagaagggaaagaaggggcgaagggaaattcaggagatagtggggaggaaaaggtgattgggcgaggaaaaggggacatgcgcgccattgaatgatagattgcttttatatttactattgttcctaccgtttattttggttcttcagctcttcgattcatctatataacacaagtagcactgtgggcgccttatctccaatttcgccttcctccttcctccttcctccttcattccgatatacgttggtacactaaattgtatctcggccagggcattgattggcttaagccacggacccattgaggaacgtgccattctaatatagagcggagatattgctccttttacttgcatctccatcaagtccgccattaccggcctctgttttgtctactccgtgctggttccaacacatctccaacataccatcgccagatcaggtcagttcctccagagtggatctgccgtcccgagatgggtcctctttggcgcctttggggattggcctacaatgtccaccctctactccatattggctggtgagagataacacgaagccatcatccagatagcaattcaaggttgggatagttgggcaccaaacagtctggatggtttgctcgacaccgcatattcatcttggctttcttatacgcctggatggcttgcagtagacgcccgccttgcataattgcatcatcccgccgcaacacagtcagctctgtcatttttgatgattggatccatccaaaaaattgtgattctcgtcgcggttccacttttagaacccccatcgtacgaatcatcggaacgtttgatgccgacaactgggttttccccgatcgccgtatgccttacgaagatccaagtcacgcccgttttctgacagatgacacagcggcatattggacgtccacacttcttttcttcggtgttctctgcttataaactgcttagactagcgttgacaggcggaaccccgcgattgaagacttggatctggccccggagtatgtgcagtgtcacatttgggcacctcaagctaggtaatgtctataacaagcttcacctagctatactttgacactctttgactttttaccgatcatagaatccttgaaatgatgtcaaagcgaacgaaaataaaagtaaaaaaaacaattatgcgcttggtccacggttcttccccgggggccatgcccgtcttgacctagacaggactctgttggtgtcttttccacggatgactggaactcaattccttgtcggttcaaatatttgtctcaacgttggcaaagaggcgagatcaacctgggatgtcccgatattactagtcgacattcaaatttcaatatcccattccatacattatcttagaaggtgagatttgataatccacaaggctgcattctttgattcgcaatgtgggctgatcctgatatgacccgtcaaacggacggtctgtgatggatcatggctcgggtgatcatgcaactgtcagcatccggaagtagtgcgactgtgtttcgaagcagcgcttatgaaggactaccatgggacaattacgagaaggcgaaaatgagccgcacaaatcgatatagaaaatgcaattggtagacattatccagtatctactgacaaatctacttgccaagtcacacagacgtgatacatacctagaaccaacacaacctaggcttgcatagtgcggagcgatcatgcttgtcatgccaacggccaaatgcattttgaaatcgagaggcgcaccatccacatagagtgctttatacatatatcaaccagctcaataaatgtatactcgaaattacagctgtcccaggaaataagaaccggacagataccccgggatcacagctaagaaaagaccgaatcacactcgacctaacttgggaccgaaggcatcaccaatcgcactcgacgtgcaacagggcatgggggtacaagttcctgggcacatgagcaataataataaacacaacatgtccaatctgtagatttaagtacctgaccctgaagaaatcaccgtaaaaatctgtctagagaacgagcgcgacccaatccgtgccctacccaacgcccaaggagactaaacaaactgacaacaagccaaacgccgaatatcccaaactccatccaataacctccaatgtctcttgcagatctccaagtcggcggactgtatgtcattctccaagcccatcatgaaccacccgagcccaatgagttctactggggtctatacctccactcagaccccgtgggagggatggcataccacgtcatagacacaggatctggcctgagaccggagcacgagtatactggtagaatattcgacacgccgcttctgacgggactgttccgaatcgccgatatcactcgtcccttgcatccatttgtcgacagggtagtaaggtcctacgacagcagcctcaactgtcccggaagaagcagcaacagcaagttctgggttttgaatgtccttgcgctactgatccagcctacggccaccggatggcttccagtgaattgccataacctgccgatcttggagcaggaaatccgcgattgggggaatcgcatgtcccaagggcgatgtatatatcagagactaaagccgattggatcttcgacgatctgcgggttgccggaatggaagatatagcgtgagttgaccatttctctcggtaatcctagtgcgggggaaacatcgattgacgcaaaggcaatggaatgaatagccgaataccctatctattcaacaggtccaatcatttgactatggtttcttgtttcgggcgctaattgacgggtatattatttcgtgtttatcaaatcaagcgattacttgcatattctacctgtcatttttttggacctaggttattaattccaaagcttaagcatactacattgactcatagtaatctgctctctattaatactacagttacttccataatctcccttggcagctcaagtctcatccaaagtagaaactggtcaggtgcctgtgtgagaagtacctccacacccgtaacagtgtcccacccctggttctgctgtgctgccgtcaatagcggcatcttcctcggcttgtacgacatctcgatacacaaacccagatcttcattcaacgagactgatcctcggtagtcgtatcatcgggtgccagattgaggagcagtggcgtttgcggcctggggggaatatatcctgaaactggaccgggggggggttgcatgaatgtctcgagacagccgaatagaacaagggaactaacttactaaattctagttactggaaatgaatactatagacatggaagatcattagaccaaaagaatcggtttctccaaagattttgcccattaaatgtttggtcatcgtcggcatgctaaaaccgtttgtggggagaagcataattattgtaccgacttgccaaagagtagtcatatggaaaatgaattgatgtatgcaaggatgatatgctagcaatatatcttatgaataacatgcatattgtagtcgcaactctgcttcacaaacttcaattgagctgaagcctctgctgtagcttcttccaagacgcaatacccctctgcgcatgctgatcgggtacatgttgaccctcttcagccatcgttctcgaaaacaactccatcgagatccatcccttgtatcccaatcccgacgtaatagttcttgcaacatcttccacaggcagatatactccgcggtcctcctcgtacatgtaagctctcgcattccgcgaccagttcatccgcgccggctgaccttccacgtagaacggatgacccgggaccagtggcgattgcaacctctctgcatctacaacctgaagataaaagacctttgcaacatcgacctcggccaccatccgctcgagcgactccttcaaatctgaatccgcattggccgtcttgccggttggcgaggtggggtcggcccacaccttccccgcgatgttgaaggtgtcaagacacatgccgaaattaggtcggtcaacgcgcttaaccacatcccagactttctcccaggtgtcgttgaccgtgctccagcagagattctcatacgcatagcgaataacgggagtttcggcggcgcccatatccgccagttgcctcagatcggccactataacatcaatgtcgtccgtaagttgctctgccgggaggaagttggcggggatttggatggtggtggtgtccaagcgtttggcgagctgcagccacagtttcatcttttcaatcagctttgcatgctgctctcggtctttgagtccctcgtagaagaggaacggctgcagcgtgataatctcgagggagtgggcttgacagattgagtggatcttatctgctgcttggagcagttgattggatgttggggtgtcattcttggaaatccctcgtgcgaaataatcgaggtcttcgtagaaaagctctactcctttgaaacccgcttttgaagcttggcccatcttatattcaaaatcatgaagccaaggtcgtcccaaggagacactcataatagcaggttgatagaccatggtgtctctgtatgggaatttgaatttgacaatgagttaagttggtgagatattcctgtggaggatgttgatgctatgtacgcggagtccacgggttgtggggtaagaaggtcttgccgttgtcggttcagatcttcgccgtacgtacggaggaagattctacgattgggtctaatgagatatttctgcatgttgactgttggcatatatgacttgagaagtctcggccctggtgcttttctcctctcaagaaatcatctcttcaccccaagaggaggaagtcgtcgcccgttattggggttcgggtaaatcaacaccgatcacgtgatacgaacggcatcagcttggatgaccatgaaagctcgagaaccaatggcttttatttatttcagagcacatatgcccattcttcgaccttcaagtgttcaagtgtttgcggggcatgtgatcaatgtcgttggtgaaagtccaagtgtgagggaactgcctgcttgctccaccgcaatcacatcggagcactcggaaacacacgactactaagggatatagactttggtcggtgagtaaaaagctggatagggggtaatcctcatacgagatcagttagataaagacctatcaacataatgttaatttgtttctacacctcgactaaaagcaaaactcgatattataaaatgagaaaacgtgccgcgaaaaaataatcccaggcttctttcatgccaaagatgaaacaatcgaaagccaacccaggccagccgatgctgcttcgatcccctgagtatccttttgcgggggatgggtggcgcgagccaacctcgacaactggaccgcgagcaaatgctctctgaaatacatatccaagccaccaaccatgtgaatgctgtgatcaacaccgctccctcccttcttctctccccagcacagcctggggccaacaatttcatcttccatcttgccggtcctacttccacttttagcccacacccgcttcgtctcatacaaagtctcccaggcgatgccaaagctcccaaacatcccgccttccttcttaccctctgccgctgcactcttccaaacgaaattgcgacctccatactcaaatcgtcgcggcgaccaatcctttctctgcatctccccatccggaatctcggtaattgcgcctatatcggggattgtccgtgtggtcatccggaaactgcctcctttagtcttctgcagcttcacactcgtcgccccgatctgaggtaagaattccccggcacgtcggagtaccgtgtcgacgatgggtgcctcgttgctccagacgaattggagggcgtacaagacgtgcgtgttggtcgagtctttgacgaaaaaccaatatgagcgcagacccaggttgaccagctccgaggaatgcgtaatccggtacgtgactgggggcgccgacggagaaagagtcagcgagaagaaggggcgttgcgaggtgtcggtattgaggaatggctggaggtgggctggagctgtgctgatatccgttgcagattgactgggatcgtctccgcggaaagtattaagatccttgcgaatctggcagttgatcagggtcagtgatctagaagaggtgtacggggtcctggactgtgtggtttacctgggtcaacgaccaagtcgttccgtcttcgttttccacctcctccatcgcatccaaaatcgtcggaggcaatattataccatcgaagctgcccttgcgctttaggtcttcgagataggccaggcgctctcgatgaacttggacctgtctctcaaacatttttctgttgattttgaggacatttcctttcttgtatattttgattgctgaatccaaaacagtgatggcatttttgtagacttgtatggcttcatcgtactcgcccttgcgttccaaaatgaagggcaaggcggcgagcttgtagaccttattgttggcatcgatttttcctgtcattgcgttggtcggaaaatagtatattaatttgaaagatgggttctatatctggtagtagtgatcggttgagttagtagacctttgcattcccatggcgctcctttataattgaagacatcggagcttttctttgtagcttatgccaaggtaggaatatgccttgccaaggagcttccgtgtaaaatcgagcctatataggacatgagttcgtgtggcagttgtcgctaacgcttgtactcgaatcagggtgcagcttgggcttcctttgggagaaagaacttggcattttgatgcaaatgatcacctgcagtatcagccatgagtccatgacagtctgtctcacagagccttatgaacttcagttgagatatgcttggctgattcttggagaaaaggatactaactaatcgcttagtattaccctctttgaagcttggcaatggcttagcggggaagcactggctttggggcacatggccgtcaagcaccttgaaacatatggtgactcagccttcaggtccttcgactattttcaaaaagttatgtttgcgaggcttcggccaaatcaaaacagcgcgcattgaatcacgaaggaatgggttgagggatccactgagggagctattattttccatctagggacgtgaccatgataatgtgataaagaacaagagcctctcaaacgtaactggaattcttacgaaatggatcccgaccaaggctttgatgtctttctagcatggtgtattgacacggtccgtaactacaaggaaagagtgctaaaagtcactttcgacactcacgcttgaatagaaacgtatagaacttgaacccattttcaatatcgggtgccatagagataatatactactttcctcactaacagtgccagtgctgcggccaccacctctgttttctccaccaagctcagtgcaaacgttgataatgtgaaaattgaacacaagtaagaaacatccgatgcttaatcttcctgtccaagctgtgacatgtgattatagtgcggggtcaaatctatcatacaagattccgtcagccattcttctctgatcactgacacataaagtgattgctttattgatcaatattcgtgataatagtcctcagaaactatacttcaagatgcagactacagtctttgacaaagcttgtgccatggagcttctagaatttgcgaacccttttcttgaggaaaagggtctttcgtcacactcatgggccaaaatgcctaatcctgcttgctccgctcccctccttcgagtatgggacaaaaactctggcagtcatcccgatcaatcaaatagaatgctggctcgtttgccccgacagcggttgggttcgcgagaaagtcgagaaaagtcactagccacacatgctgcctatcagatatgggagccaacgccattcatatcctttactgcatcagtattaggtctgcaaagattcctgtctaggagaaaggggccacggttcccgcgaacacttacggttatcaatccaaacgttcgcatcgccaacggtctaccgatactcgaaatggaatcagaactaagatattacgaagtgcaggacccatatagaagggcgtattctttctatagagatgaatatctctgtctttgggaggttacgcctgatgaggtcgtagcacactgggactgggatgaccttatagaggacgtccattggtacgaggacaaaatactacctgctttcaaggagcacaacgatcgcttcttacgcagaagtcagattgagacgacttttgatatgtcaacactgcaaagtgctttgcccggcatgttctctttctcagtcaacagagacgaactgtctgggtcagacctggaccgttctcctgaagcagactcatttccaaatgaaaattggagtttctcaagcgaggaggagaattggcaggttgaagatgacacttattgggacacagacgatgaagtggaggagtccaacgcgattgatgattcatttaagatccttgaaggcgactggtgaaaacgatccttgcagaacagggaatggcgaaggttaaagaagggtagattgatgtctaccctggccctaaataaaaccacatggagcaaccctgtgattcaaacacgagatgtcaaaggctcacagtatcaccaaaaatacgactttttcctcgtgtcaatcattatgtttcagacatgcaaggcagcagctgccgtatgaattctaccctacactaaatcatagatattaccgggctcgcttcagtaacttagttaattctatagtatcagaacctttttaagcttcttctccaataacagctgccagaaggcatttgggggtccctgtagtagctatacaccaccattacacgctagtgtattttttaaaaaggaaaaaaaggttgagacagaacttttgaaatggacctccataggtactatgtagtatgtactgtaaaagatccccacaatgctaatgttcctcaggccatcggcttaaattgaaaaggaaaaagaaaaagggtcgggggaattgaggctgagggtcccggctaggcagccaggcagtccagcaagggactagcttggtggaaattggccctggagccccgagtccacttagataggcatatcatgtgttacttggaatatttcggcgctctttttctatctataaagtcctaacgagcgcaatatttttagcctaagagtacagccacaccgtaaccgccaaactacaaagtacaggaattggaaattttcgagtcccggccaggcttgccctgtctggacccttccgagctattttggtggccattaaggggtccaggtggccgcactagcaccgcactagcaccgaagaggaaagaaaatatctcttagtcggctagaataaaaggaaccagccaatgggaaggcttcgtttcagttgtagatttccaagctttccaaggtttccgtctagatgcttactgcgctgaaattgaaatggacttatataactatctccaagtccatcttcttgtctccttttcacgtacaaattccatttctgtcgctcgttgactaccccgacattcgttaattcgtcatttcgttcattcattcattcattcgttattcattcaatacaacatgcgtctccaatctctcgctcttttggccggtgccactacagccctcgctgtccagacaacctctcttttcctccccggattcgacgagcaacgaattgatggcaaggtcattggcactgtatgtgcaatcatcctctctgttgatttagcacaggaagttgactaatatctttccagagcggctccatgaccaaatattatctcaagtgcgctcccaatgttgacgccgacgagtgcggccttcccttcgatggtatgaccgtggcccaaggcccttcaaccgtcagcctggcatacagcacagaggatgtgtaagtaactatctgcaccacttatatatacccccacactcagagctgatcctttcccgaaacagcaccatcagcgagagctgcaagttcgattccataagcgcgacgtgcggcgcaaccgtcgtgaccgatggcagcacctcctcgtggcactcggccatcgcaatcagcgaaatccccggtggcgtgtacatgcccgtgactatcactgcaactggaactgacggctcttccgccaccactggtgctgccgtctccgcttctacggccgcttcgactagcgctgctactatgactacctctgcttctacttctgatagcaccgctgctggaactagcactggaactagcaccggaacgagcactgacagcagtgctgctgccaccagccagactgagactggtaatgctgctatgcctatgattactggaaacgcgcgctgggctgccggtggtgttgctgctgcactggccctcgccgctctctgatcatcgggtcgttttcttggaatgaacttggatgcccaacttcgttaatgcctgtctcgataaatatgtacctttctcatgtataatatgcaatatacgaagcgtgtaatactttgtacttcggtctgatagacctttcaaaacctatattgttggcggtcgaatatgtacttcatattcacgcaacacaaccggaggccttgcaacatgtacaatgagcgccatctaaagcctctatatcttcactctgctttatggagtgtaagttacgacttgcggtgcatgacgccagccgaagcctatagattgtcagaacatgtctataacaagatttaaccgcaaaataagcttacctggtggctggggaagaccagggtatcggcgatcacaacgttctcgcgacgcccagctgcaaagacaatcacctcggcgatgtcatcaccggtcaatggttcgacgcccctgccaattgttaactatattctgtttcagttcccttagcatgacttacttgtagacagcatcagccttagacttgtctccatagaatcgcacaacggagaactcctaatcacgatattagcttcatatcaaaggcgaataatatatgcgatgcccataccgtctcaacttgaccaggatcgatttcaatgatacggattctcgtggcgacgagctcctttctcagagcatcagtgaacgagcggacagccgccttggtggagcagtagatgctaccaccagagtaaggctcgcggccggcgatactgccaatgttgataatatcgccacggccaccctcagagcgcttcttgaagatgggcaggatggcctgggtcatgttaatgagaccagtgacgttggtgtcaaacatgaccttgatatcctcggcagcaatcgaaggtgcctgggcaacacccttgaccaagccactttcaccgtgaatgtcagtatcgaccgtgcatatcaatcagtttagcttggtgtgcatgactcacgcattgttgacaaggacgtcaatctcccggaactcctcgggcagggaggaaacaaagttgctcacttcctctgggttgctgacatccagcttgacgggaagaacctggacaccattgccgacctccttcgtgatctccgccgcgacctccttcaatgtgtcgatgcggcgcgcggtaaggatcaacttcaggttcttgggcgacgtacgggcgaactcctgggcagtgctctttccaatgccagatgaggcaccggtaatgacgatagtcttgccttcgaggcgctttgccattgcggaagccatggtgcgtcggatagaagttcggaaggtggggcttgcgaagagagctggggatgtagaggggcgtgagagtcgttgaaagagtccaattaatctgaagcacgctcgtagacgggtcatggatcgaagtctctatttttcaaggagaaatgaaacgcagaacccaaaataaatagattgatcacgaacgagtgcggggactctggcgtcatattgtgttatgtaatcccagacaacgctcgcccgcgatcggcaagaaggccgatatttcttatctcgagataatcgtgccaagcccccactagttatgggccacgaatcgacgtacgtgggagtaattccacccttgccgaaataggaacctaccgatgactattcccgtatagctgggtagtgaattgggtaattgtgcagggagtaagaagctagcttgggaattgagaaaatcaaagtgttcattttgtgcctatgtatctgctgtatggaatatctatacaaaagatacttaatgcacagtgactcacaaacacagcaaagatgttgtagggcgcttgacacggttttcggaggtcatgttgataatggagtttgtctctgaatgcctcatcatattctttgtactccttagagtgactaagatgggagacaaagccccgtaggacttgttcaaagaaatagttcctctttaaaggaaaatgccctaattgggatggtcatcttgaacatgacaaagggccaagtgcatgatcatggtgattaacgcgagactcgttgtagctggacaaagatcaaatgaatgccattgtctacatttccttggaggacatcgattcatagttctaaagaccaggtactgcccccgatacatctaataaataaccttgatgatacccagcagtgtacagcaatcacagcgtcggctctttcccttgagcccttttttgatcgttttgttcagacagagagagcaagggtcgttccttctatatccagcgcagcaaaaacaccacggtaacctaccacctcttcctagatacaaccttgttgacattctaacatttgcttcatgtgcatatatcctagaatcacgaccacacggctcgattgcaattacttacatgggatattgatgacaacatctatcggatattacaagatatttcatcaggatgccttctccagccagggtttgctatatgactcctctgaacattgtgtcaaaccgtaatggaagcttacatgaatcttcttcaacccagaaagcttcatctgatgagcttcttcgccggtgtgattttgattgggccgaagatgttggggacgctgcgaccaacgataattcacatatgcccatcacaccagaccctcttggttacccattgccaaagccagatatacacaatgagatatatcctactactcgctatcttagatatcccaattataggccatcactcccaactgtctatgaagaagtctgggatgagacattgggctgggtacatggcactcaagatataacctccagctcttctgagagaatattcacagactccgatgatgatactaccgatctttcagcatacgagggatctcccatcaatgacgagttagctcagaacatgttcacagtcaacggtgaaccagacctccacttggctgcacaacagtctatcaacaatatctttggggaccgtcaggcctggatcaatgccgatacagggattcatcacttcaactggatggggctacgagtttacacacgcagctcgacctctccgtctgattcgctagccattatcctcgcaaagccaaaaaagccacagggaggtgccatgtggagagtttactcagttctaaaccgagctacccagtacattgaccccgtacttgtatttttggatcaccaagatgaaagtttgtttgaactccgaggctcagagcttgtacgtgcctccgctggacgtgttttcaaattttattcgcctcatggaatgtggatggaggattcgagcgatacgaatgacgatattacgacagactttggtaatacccggacttacgaagcgacaggtttagccgttggaaatggctttgttgagtcgagtgccattcgctcactgtcacaatggactgagtgccgtgatgaagcctctgaagccgctgagagatcgagtcggtttccccgacggaggacttgggagcggaaaccctcaccactgcgacaatgcgagtctataaaagactcagagtaccctgaggcctcaagctcactggcgttcaagcaggcgaagagaccgcctcgtaagattacaacttgtgtagctggggcaccgcgtgaagaatatttctccttcccgactcctatctttggtcgctatagggcaatcaaaaaagcattccaaaaggtgcagcgggggtggaaatcgatgctcagatcaatcaagcacactctgagctaggtagtagtccctcttctcctcgatcggattagctttgcatctaatttagattgtttggatcttgaactcacatttggcaggtttcactttgctctttgattgccgcctgtttggattgatcagattgagcttactctttggatttgctcaggatcagcttccatttggcaaggatttttgtggattttctattttctccatgtcgatatttcaaatttattgttgagaaaatcaagaaccaaagaaagggccgtgtctcttacgttcaaatgttgtctttctttcatttcctttatctgactatcagcttggttttgggccactttcatatctggatgagtccatcatgccttcgttttagtttcatttgtgcgagatcaagatctatgctgtacatccttatcaaagaatttatgaaggcttccttcaatataaagcagacaagtagaatgcgtacatgttttgaagttctaaatctcatgagcacaagcggctgggtatatatattcttcatggatggctggcaagcaacgttgccggcggtggctgtccaaaggatatctaatggcgaatgatcacgtagtgtctttatgagaaacaaccagagcgcattcggctagatgatgtcggaggagagaaggagaggtgaacatgtaatggcgatcgtactacgttgtatctgtaaagaggaaaacaactggtgtcgattctgctaagttctcatggacagaagggagagagagagaggaagagaaagcggaactatctggtgatctgtacccacatgggtgactgccttccggacacccaacaatatctgatgcaatccggtaggctcaacgcggacttgattcataagtctccattctcacccgctttctgacagaggatctatagaaaggtatgatagactccgctcgcatctttcaagtcttccatccaccttccatgtggcgagtaaaacttaaaccaggcttggattctgaactgcactcgacatggccaaaatttgttgatatagtgctggatggcgtgatttcgaatgtcatgccttgtatggtcccccactcgatgacgctcttgaactccgttcctccgtcgaggcgccaaatcctagggtatctcccggtcctaagcttgatcttctcgtagaacgatttcagcttaacggatgcctcgcccttattggttagggttggtccttcgaggtaacgggtcgcatcgtcgaaggaaaagtagtctgacttgcagacacttcctcgagagtgccgtacctcgtcggcccctcggaagaaaacgaagaagactcctccgacgagtcaagtatctgaccactgtgttgttgtcctttttcctcaagcaccttccgttatctggatttttgctgtacccgaatgcataaatgcaagtgacacctcaggtgttcgtgtataaactggccagtcgagccagatctagtggtgggttgtaccatcctggttgcaaattgccgctcggtacttgaatttgtcgagctagcaccgggagaccgtcacgagctgcagaattcgagctaatcttgacagttggactggcttcaaggacccaagaggtacgaatgagcgctcgaagattgggaagtattgactgttggattaaaataacagtgcgatccctatgcttcttgttgcacacttgcctagggcacaggctgttgctgcgtgcctagatccccccaaacacccagcttctttggctgactctagtacccgattggatgtcaggactcgatagagtgtctggccccgcgagcaggggacgtataggtcattggcgcgaacatccacaacatggtgaagtgcagacttgtgattctcgatttgctcgttgatagtgcgggccaagctcgcaccccccgagaggaaaacctgatcgcgataaatctgcattaggtaggatgcatgtagattatcctatcgattttagccacaattagtctcctagtcccctcacaaaataaataggcagagtggggaagacatactatccgagtgattgtgaaaagccatccaactcctagccaagatgattcctaaagggaaggagccgttgggctttgtgtataaatgaatatatcatgaatggcttctgtagcaatgagaatgcgatataataaacgatcacctaagaaaaagaatatatatggatttataaatgatggtgatatgaaaatagaaagagagccaaggaggcagagagctggctgtcgttatatctaggtcctgacttacgagggccttaggccatcaagcattattctgtggcggagggagagaatgtcacggtctacgattaatcgctatcatgtgcttcatgtttgctcgtttgctcgctcgactactgtttgcattccatagattgtttgttagatagctaagcgagaaggttggttgtttgcaacgtttgcaaagtggtcagctatgtcattccactttgcaacttgcttcttctttgttcatcctacgttttagttgaatgcacttcatagggaccgcactctttcccttcgacgaggacgcaccctgtgatgagggaaaaggcgtggcatccgcaccgaaggaaaaaggtattgttaacttttcaggtgtacgttcctaatcgggtaactactgcatcttacaccccttccgatttactataccgccttcgcgggaaatagcagctaccgatcatgtgatatttttgtgtgtttttgattactaagtttgtccacaagattgccattttcggagcaattgtttttatttttagttagttaaagattttattgaggttttctgccacatatacactcgccttatcatcgattttccaccacttttcactatgtaaaccggaagtgggcagaatatacggcagaaattatggcagaatacattgtcgtgcctaatcgggaaggttgtactgagggttgcatcaacaatcctcatattatactttgttcgagcataaatagtgtactatgtagcagtatatgggcagaaggaaacacctaaaatggttgagtctcctttttctttggtggagagtcctcgggggtcgttgaatcaacgttccccgacattttgggctaaaggatggtgaccgactacacgaggcagtagatcaaattgggtttttgtactccgtatgtacagtagaacggccaagaatgcgacggtcgacaaatcaaaaagtcgaacggccagcaagattggcggtcaaccaattggaaggatggaagcgcactgtgtggagtgcagtgaccgggatgtaagtctcggccggttggaattccgattcgcgaaatgagattccaggatggggcggtgcgatgctagcaccaatgggaggaaataagggattgaagcttgcagtgatgcagaggcttcaagaacgagggcttatgacctgtttgagatggaatcaagaagtctatggatgaaaacgtagatactatggaaagtctcgtgaattgcgtgaggaaagaaaaggaaactacctatgcgctgggactaaagtagttgtcgggagcggagagaggtgacttcgaacagttccttttcaaatgggtgaagaaatatcagagtgcagtgaactgaatcagagtgcgaactcatcacgatatcagctgcgagcaataataacctgtaaacaaaattctattcttcaagtatctagcgccaaactatcatatgatatccaaccatatgaaagcaagccaaaatgaaaccaatcatagaaaggaccgtagtcctaaagtgactgaaatgtcacttgacagtggcagcattccgagaaagaacctcaacctcaaccctccttagtctgacaatgatgaaagagtctcaggtaaaagcacgcgtggggtgaaagctgctcttatcaaatgcaatgccctcttcatgaatccccacatgattccaagggggaaaacgaacatttcgcgggggatgttactaaaagtaaccagaggcttttcgatgaatatgcccatactgccaaacgggagagaaaatactgtattaggaacagtggtaggcacaggccaggtcttcttcatgatggttctcataattccaatggggaaaacgacagagctgtgaatcgtctttgtggtgatccgagccttttgagtattgcccacgatctcaagtgggacagaagagaaagtgaggggtcggcttggtggtgatagctccttggatgatgtcgactcgatcttgagcttggaaggcgtcggcttccaagtgcgtttccgaggagagcgaacgggttccttgctggcagcaactagttgatctcgccaatccaaccactcatatcgagaaataaacggtccaccttcaagaaggccatttgcaacggcgaatcgcccgattgcaaatctttccaattctgactccccagcatcaggaacgatccttcgccgcattgagaaatcatcactcatccaatttccgtggagagaatagtgagtgtaggtgagaccttcgcatgcttcaatcattgcagacccatacatttgcaagataccttcgtcccctctgtccacttttaaaatgacagggtcaatgtactcgattgcacatttcatgatcgagtttacacggagcttatctcttccccgtggtgctttcggtatagcttgcataaaagcaagtgagacccctggtggggtggcagttcgtgtatagactggccagcccagccagttccagtggtggatagtgttatcctcattgcaaatttcagcgcgataattgaactcgtcaagttctggttggggactggccagctgtaaattttgaactggctccgtggtcgaggcggaatttgggatatcgagcgactgattaagttcgactggctgcggggagtcaataatttcattggaagacatggtaacggccatctcaggctgatggtccatggcgagagtggcctcagcattatcgaccgagtcggatgtctcgcggtgcaagaggtgagcatatgaatcgtcctataggtatatcacagtcagttcctaaggttccaaagaggtagaggagccggcagtgggaataaataccagtgcgacggctatgatgggaccgttggttgtagcgggaggttcattatcaatagccaggtatttggtgtccatggcggtgtcattttcatcatcctccaaacagtcttgatgaacaggaggtttggaatacttgtcgtcctatagtgtagccattgtcagtgtctgtgtctgaaagtgggctggaagcggatggtagataccagtttgctagtggtagcagggctgctaggaatcgtagccaaatcgatgcccatagcaatataattctctacatcctccaaccgatcaaattgttcgtgctcgagaaggtgggcatatttgtcgtcctatatagtgtaaagattgtcagtatataattccgaagtcgatatgtgagaaagaagtgggaatcaatactacatttctgtcgatggcagggccaatggaagctgtagccatgttctcggtgtcgggagtggggatgacgagggctttggtcttcatagcaatgtcatcctcattgtcctccaaccagttaaactgcccccgagtaagaagaggggaatatttatcaacctaatggtgtagcaactgccagtaggtatgtgtgatggaagtgggtatacataccagttcagtggcggtgatagggacggtaggagttgtagggatggcttgtgtcttcatagcgatgtcgttctccacgtcctcccaccagtcgaatggttcacacacaaggaggttggcgtatggatcagcctagatagtgtagccgtcgttagtacctaatcctttgaagcaatagaccgactaggatagggcaaaataccataataaactctcccattagggcttagataaattgatgaattgaagtggagatggaatagttggtagatgaagataagttcttgatgagatgatgaagagtatgaaggaagaaggaagcagatataattgctgaggatgccttttatactgcaataagcaaccccaaataggaacggcctcgaggatggtctttgctctagacaaacattaatctaaagtgtttcgtctgatctataactaccgcacattcacgagtctgtctcttgttatagcacgcccagcacgtacacaaggttgggatccattggccgtagaataaagtaggaaatagttcccccattggtgaaatttcagccgtctatgccttaagtcaaaaaatgaacaggacttaagtatattagatgaaagtccggagctaaaagagctatttcataccatagagtgaagcctctacgccgtcactgcctgtgaacacctaaactcagagacaagatttgtttacatgggtgatggtagagataaaggccagaaccgtgttctatctctactatttccgaagctaatacggttgaaccatttccaagtccataagtgtcggtcagttattaggttacttcaattgactttcagtgttttggattgctaaacttaatttcgaaagaacatcattatttctagcgttgtcaaatttatagagagtaagtagtgttcacagaacgtatctaaatcctttgttgtcgatctcagttttgtccttgggagatatgagttagcttatatcgaggcttcatggggcttgacactcaccagcatgccattttcaacaccttctgcctcaacctcctggccattgattgcttcgcggtctcgacgcttgttctcgaggtacatgtaaatatacaaagcgacaatacaggccagctttactgagtagccagcgagcatcctgtataaacccagtcaatcaaagcttttgcacaaggatgaatagcaacatacgcaatataagcactgctgtacccaggggcttcactggacttgaaagtctgaggtccaatgatgtttcccacgcagtatccagtgaacaatagggcacctgtcacttgctttttagtgtatccagcaatgttggagctaacaattgtcagactcatgctgaatcccaagccttggaaatagcatagccaaagcgcaacaaggcggccccatttgttactgctaggcagtccgacaaggagacccgctccaagaatacagatcgtgcaggcaaagatcatgcatgtaaatcttgaatggaatttgccatcgaactttgttgcaatataacctccgagaaggagagagacgaactgaacagcaccgcccgggatttgaagatattgagttccgagcgtatcaaatccgaaagtgccgacgatgatggaagtaaactgttttagttattagcttcgtttacatccaattataggaagacatacactggtcaacgccgagtttgggacttgtgcaccaatcgccataatgaacaaaagccaggtcttcggatcctgagccgcttgtcggacttgataccatttgaactgactacttttgacaccttggcggttgatggcaacacgctcgacggctatggcgcgctcacgctcgctgagaaatttggcagttgacggaagatcggggagaagtatcagggcaaaaactcctgtcgcgatggagaaagctccaaaaatgaggaatacatacatccatcgtggaagtccagtggtgatatgtccgaccgcatagccaatgagactataattgattagctttcagtcttgattccaatgtagtttcatagaggtgggtggttggtcgtcacttaccctccgaacatcgtcgcgataccattagtgcagtaccatgacgctaatcgcaggggttgttcttcggatgtgtaccacatgccggtcataagaacaaatccaggagttacaactgcttcgatcattcctaacaggaagcggttgattgcgattccagcaaagttgtagcatgcaggtgtcgtcatgagcaagccgccccatactgtttctcttagcatggttcttgagtacacattcctagtcctcataggatatttcttacctaatgttgtaatcgcaaggaacttgccgacaggcagcttttgcaatgctagccctgcagggtattgcgcaatgaggtatccgaagtagaaaatggagcctggtcagattagtgatttgcattataagttttcagaaccgaagactcactgagccatgagtattgttgtccttttaagtgtgtcccttgctttaaaccgtagacagacgcaaagttgatgctgttcttgtccagatactgcatgagattagtacttggattgcaatgagcgagacatgcgaatttcccacctgcagcatgtaaattaagaacagtgatggaatgaggcgtatatcgatcttgcgcagaaccttcttggcctcctgtgctgtgtattcgagaccgtgatgttgtttataaaattcatagttctcgtcccgttctgatgaggtggttgatgagataggaggcgataccgacacttcggcttctttttgcgaggccatgctgtcgatttttctcggtctctcgaactcaaaaggttaaagatagattaaaagacgggacgaggtagagttttataaaaccgcacgcttgactggcagcacggtccatgtggaggattacacaataataataggagccacggcctacaacatacgcaaccccagggagttctatggacatagtggggatataagattccagctagtctccaagggggttattatgcgatgagacagaatggtttctgacaggggtgcaagtgatatctaaaatgtcgatagatgccttgacgggcaacttgggtgtttcgagtagctaacttaaacagcactgatctcgaggctctattctacctaaatgcatcagatactgtctttagaaaagtgacgaggtgggtggagccattcatgtatcacgacatcgccgccgcaattgcgcgtttctcgggccgtatgatcaacttctatctatttagaatcctgtcgcaattggcttgacactcggggctttgccgtgcccattggatcatcatttggagaaacaagaaaatcctgcaacaaatcagtttaggttcaaaatctagttctttgcagaatctgagcggggtccatagaatatacgtttggcttggcacacgtgctgcgtcgagttcaatttgagatcttgcgtattatgcaagtcattcttcaaattagacccataaatcccttctatcccattaaatgcccttacacctaaacatgttggacgttaatataagaacgaacggattccggggaacaaacctcggaaaccaggggccttgattatataatcattcccgacaactcctgcggcccctacgtcatatatatctttctagacactatttcctctgattcctgtcattagttcattgaagtcttgcttaattgtttttgtacatcttaaagagagtgttaaccacctggcaaaatgggatgcatgaatttgtatgttgtatggcgccaaaagcttcttgttcatagggttatcgggtcgggctattccgtgccggcggtctaaatccaggccaggccccaataactatggtcccttcgcaggcggtgatcactaacatggtctcttcttggttttacaatgcaaaactatggcttctctgatcaaatgggccaaggtagtatttagaagagccccttcacctcctcttcgctttccaaccagcgggtttgaaacaatcagtccatcttaaaccctcgaagaagaacggtttgaagggttcaaaaaggggcactactatcctcctaacattggcgatatcctgcgacagaagtatcaagcaccggaagtcatgctaaaggcggaatggagctatcggattgatatatggaacgatggtgttatggtaagctcttatcgtgttgtcatgtcctgatactaggttcaatacttcatcactacgagaaactaggcgtgggacctatttgagggcaaggacttgtttaatggggacgatcccgataggaaagggtattccacgcgtgcgcatcttgctgaagtcatcgcaattctaggcccgcctcctttgactttaatcaggcgcgggacgcgaagccctgagttcttctctgaagatggtatgtcatccatgatatgattctagtagactgaacaaaagatttcattgcatgcggcttataatattatcccacggggcattggagaaatgatcttgagatccggaaagatgcgtccttgcacaagtcagaagaatttctgagtggccgaaataaagagatgttcttggaattcatgaaggatatgcttcaatggaaaccagaagatagaataacggccaaggaactattacaggatccttggctaaatggccgttcgaactaggtcagagaaacaatctggcgttggattatatttttcactggggtcgtgtcaacaagaattagcactataaattcttctggtatttcaacttcttgagatcatcaacatcgtcaacccggacgcgcgacttgcagacttcaagattgaccagtatcaacttgtacacattccaaatgtccgatcactttgttaccacgtgctgaacaacgagttcatttctcaatcagaactcgccaggcccctttccgaaaaagctgcctttggggactgtcaaccagggaacggacttagaatcggccgtattggatcccactgtattaccccaccagttgaaactgacagcgtggtagcccaacgcgaagaaaatgatgatggtcgcaatagcagttccggtatccatggctgcttggagcaaatctacccacgtcttgaattagcgacttattctcaggagtggaaacttgacgaggtaggatctcacagttgtaacgcttccaccagtcaaatgcacgcttgcggatgatatagttgaaaatgaaaccgaagatgaaccagagggaatattgagctatttggtcagatcgagtaatcctaccacgaaactttggagagacatactagtgtttgctggaggaatattacccgccgcattaaagaaaatcgggacattgatgtagcgaacccagctgttgggatagcggcggtaaataaggtacacaagtgtagtaacaacgggctggagagtcagtaaactgcagtaatatcaaagtgtttgagaacttaccccgataaggaagaagtatacaaggccattgtacacttgtccagactggaacattcgctgcggaccaatagtgccccatattaaggaagcattgtacatcactttagcaccgttgcatgtgaagcgttgtttgtttgttggttcgcaaaggtcagtaatatgtccaaacatccatcgtaagactgttgtcgtcagctcaaaatgtaacacagatttgacaaaacatcatacctccagtctgagttgctgtcgctagaatactagcgtagatctggccaaagaacagaacacgcggaggaattttctaaataattagcaaaggtcgaccaagagagtacaaaacaggcataccatgtattgcccgagcttcaaatcctgagcaaaatccatgccgtgtttcactgcattatagccgtagcatttcaccatcagattagcgataggcttcccgggccaagcgtatccggcaatcatctccgttatgatattgaggaacacgcgctggttggttgttccttgcagaataccctcgggaacgatcagaagcattgccaatccgaaacaaaccacaataaagccccagaccggcagctccgtatcccagtatttggttgtcaagataccaagtcccaacaccaccaccgtgagaactccgtaccaccattctggaacctctttatattggcgcatcaatcggcgatgaatatcttcacctccatgtcgtgcattcttaaacctttcccaaatttcggtaccattgtaaaggtatgtatgcacaacgattgcagtaaccgcagcgaaagacagtccataggtcagagaataggacattgagatgtacatgggagagtactccttatacttgctctcgctgaagtccaaggccgagttgagcacacgagatacattgtaggattgtcccgtgttatcgaaagtgctggacgagaggagagggaggctacaacatcagcatattggaatcccctcaatcagactggaaacttactatgcgctgtaccacacattagagtagtacagaatcggcgataagaaaaggtaaaagaacacaacaaccgcaaaagcattgcatgtgatgtagaagggggtcatcagggggtaaccagcgtagtttatttgtgtccagtcgatactgataggtatcaaacctaatccggaattcatctaagcaaaacgagattagtttcatgtagtgattgccaaaattcatgcgagcttactccgaatatcgtgttgaccttctgattatcaggcgcaatccacgtcacaaaggcgaaagcgctcaaactcgtccagatgtagtcggggaaccagaataggacaaatgcaaatgccgtaatgtaggcaaagaagcgataccgagtaatagtccaaccattggctgacgtacggctttctggctcatgtagtgctcggaaaagaacagtggatgacagtgaagtaggccaaaccaaggcagcagggtacacaatccaacggcgggtaagacctgtcagaccaaacctgtgaatgatcagtgactgaataggatagaggaatcaggatgcacatacccaatcatctgtgtcgtcaaaaggtacaggaatgagaagccagctccgaggtcccggttccaatatacgggactgacgatcgctaccaaggcaccttgcgcgtaggcagtggtagcactgatattgacacactgttttgatttgttagatataattcataagaatgtgaaactttgcttatgctcacaataacaatgaacgcgtgctccttgattgtaaattttcctgggttgacatcgaacgaaagttttcctagaggtaccctccacctcggaagcttttcccatgctcttccaatcgggaaaacgaggatttgagcgacaacatatcctattgtgagggaaggctaggagatgttagtaaataccaagtggagttaattgaaacatacatatcgtaggccgaagaattgattcactccggagaaaaggatgacaaaaacggtcatcaatatccaggctcgaacagctgtgataaagagttagttcagccaaaccgagaaagttaatgacttactattgcaggcgatggtgggatcatctttgttggacacacaagccgcaacctccggaactaagaagtgttaaaatcggctgttgggatatatgggtcaacctacaaggtgactggtccccctccacactccatttgaaggcttcgactggtgtgagctcggtgagttctgctctgtcggatttgtacagccactctcccggatcttgattagtgttctcggattcgagatctgccgctggtacctccgatatattcagatctttggcaagatctttagagctcgccatagctgaaatacgtttgaccggatgtgcacaaaagaaaagtgatgttatgagagataaaaaaagacaggacgctgatttcttaatatttgtctgcagctggcaggacgcagatgtgacgatagatccactcaaaatggcaacaagttccttccaatatagtgacaatgccaaagcgctgaagctagtccaaatccatagggttcaaatggttttattatctcagttatcatgaacctaactggttagttacccagttatctacaacatatgttgtacggacacttgccgagacacctgctgacgcaaggcagcaaggccccgtgcggggatacgacgcattgacctagctaggggttagtcttatacattaaagagattccaccgtctgtatgagaaatattgtgattccaagtagtgtgatactagtggcaacggaggaataacattgtaaaaagtgacccataactggaaaagggtacttgtagaaatgctctttttcgttacaactcagtcaagacatgccaagtacaccaacaggcacatcttcggtgtgacttcggtgtgggaagagcttaaattatggatggcgtgccgaggcgggttgatgagcttatccccactccgtaacctctaaattgaccgcctttataaaccgctttccaatcaagtatacaatgccgtagtaagtcacatgagttttaaaccggcagaaccggcagaattaaaagggcggtgaacttgtttgagttccttcaccaatattgcggaggttccagtgcctttagattcaacgctagaccaatcaaagcagcacgatagctgctgattggattcgaggaaatggtgtcattattggggaaatttacccatagtccaatataggaatgtgtcatttacgagggaaacgatatgatattctgacgaaagaagtactacaagaagagcaccatttgtaggattgatacttccaatagaaccttggaatattcggcttgcagctttaaattcagagttatccgtggtagaccagcgatcggacataaccttggctagtgcgccattaaatgcgattcacccatgctaactactgtagcctattccggcggagaaatccgaaaggtaaatatagtacctatttcggaggagagttacttactccactaatgtgtcctgttaagtccgatagcagtgactctcacgaagatatatcttcattctagtcagtgagtgatatatgtcatccaggcaaacatgctcgcaggatcgagaaacattcgccttctaggattgcagcttggagacaggaagttcgataacataggaagtcgtctggatatatctagttccattcatgtactaaacatcaacgacgctatcttccggtgccaaaggaggccgactagctgccatattacattgtctgaacacgcgcacctcatcctcctcaaaagaaccaacaatcgaatgcatcacaccatgattgttgaaaagcactagatcgccctcctcccagtcatgggtatacaagtagcaaggatcaatggcctgtctttgcatcttgtacagccgttctcgaatctccgtgagattatccagcacctgcccgttctcgagatggattttccgcacacatgttgggtaaaccatcattgcgatcttgccagtaacagggttcttccaagccatggggtacaccctgatcttagaagcctcaaaaggaggcaactggtcttcggccagctccaacccttctgatataatccccaaaccattggagcgggacttggccttgctcatccagatgtatggatgaggtgcgtactcagccttgctggtgcggacgaaatgtttatcttcctccgacaacatctcataaaggcggtatccactgaaaaacgccgttgttccaaggggaacgtcaagtgtagtgtcggtgccatcgtcatagcggcagatctggcggcggcccctggggactttgacagccagcaacgtggtaaccaaaggcggatcaagattgtacatggccgagtcgatgtgccagcggtagaagtgtgtataaccgtgatcttcttcaggcgagatggggttcttgtggaatgtcttgtggtgtgggtgtttgaggcggatgtttgagagtccctcatactcttcgaccaagccgctgccgataacttggacttgtggttgatgagggatggttgtcaggtcagcatggaggacgctgcgcttgtcgattgattttccatgactataaacaccggcggaaggatcgaagcgtcgagtgagttcgtactgggcacgtggggagagtttgccttggcttttgatcacgacgacttgattctcatacaatgtccgacggagaaagtcaaagtcgtcatctaatatgaatcagaatttgaacccaataaagctgttttgagtattgcttacctgtcattgtttcaacatcgaagccggtgagttcagccccaaagtctacccgagaatcatcgggcttggtgacaggcttgcaagaaagagtcatggtagccattttgaataaatcagctgagataaatatcaggatgagaccaatatgaatactactgctgagcgaccgtacgtgctttatactgtttgtacatagtaccacaaggaccaatcaggacggtgcgggtgagatgctgcggctcacccgtcccagctcacccgtccacggagataggatcccaccattattgccaatccatcgagatgataatacaaaaagcattattcgttgagaaccgaacgttccgagacgttggtcttatcaaaaatggtggtacacatacgtggactcgtccgctctgctccattctcgtctctgcttaaaggcagcgttgtgctcaacgacgacaatatatccaacattacctgttgaaacgaatctgaacattgttcgaaaacacgaaatgcctgaatcaacaagtttgaccttcgacctcctctctgatgagatcagacaaagctccgccattggcgccgaagtccaactgcctccaggaatgcccttgctggatttggaccgcttgaccgacaacgacaaagatactctccgaaaagctcttttcgagaatcaagtcattgtcatcagaaaccaaaagggcattgaccctaccgtcttgccaaagctcgctaaggtttttgatcccgaagcatccgacgtccattccgcaggggagaaagctgtgagtgatcccaagaacatcttgtctgcatacaaagcaggacgaatccctagagcccaacaagttggaatcattggctcggggaagttccaggattacgaggggctgaaggagttggaggtggtgcatcttgttcgtgtcccccgtctgaccgacgtactaaactttcatttgactgaccagtgatacaggaccacacattgttccacgaggagcctctcagtcaagaggaattagatgatggctatactcgtccataccggtggcacatggatactcctttctatgagcgcctgccaggcgaagtgaccatcttgcactcaatccgcattcccaatgtgccggatcagaagatcaagttccctgatgggaaagagaagactgttggtgctggagccacggcttgtgagtttatcgaacaaatgcagataggtgcacacacttaccgaatacagtcttttctggcgctcgcgtattttcgttgttgacgccggaggaacaagagtttgctctgaataccacagtcacctatgctcctcaagcatacgagtatatccgccaatgcaaagcttccgacgatggcttgacgatcccgaactttggacgggaggtaccggtggaaaaattgtcggaatgggcgtggggcaaagtcgccgagcacccggtaggttgctattctgactgcacaccaatagtaatgagcatcggctgacaactttcatcagatggtttggcgaaacccgctgaatcccgaccggccattcttccaggtgcatgggtgttgcgtttacaaacttaccacgcggaacccagcgacgggcgagatcacggtaatggatgacgtcgagaaggtcagagaagtggtgtacaagatgcagagtaagatatatgccgctgagaacatctatgcccaccattggcaagagggtgatgtggtcattttccacaacaggggtgtaatgcacagcattactggccaactagccaagtacaaggaagaagaggacaagaggagattgctctggcaatgtacaatgacaagcacaactccccccaagcccttccgggaatacgagggagtcaacgacacgggttatgtgagggcataaattaagatgtaccaatggctagagtagctcaatgaaagaatggcttcgaacggctgtgaattttcgcttttctcaaaactgaagagggtcatgtagagtgtggaatgttccattgaaccatgcgtcaaaatcgatatcttccgctgtatcccacgccggctgcatttcgttaaaatgggcaccgatcacatcttgaggaccggaatttgagaatctgctaacagatgtgttagggctgtcaggacctaggttcattctcgtaaaagtcgagaacttagccagaatttgaccgaaatcgatggttttgttgccaagtcctggacccgaggctgcatcggccgtaaaaattgcatcgattaacgcaacgcctcgttgagcaagcacgtcattacttcgatcagcaaggcgggtgcgagccgcaactattgcgtccttgtggctttgagcaatagtggcttggttttctgcagttgcattaacctcaaagcacataatgaccgcagcggtaatcgcaaaggctgtatgggtccatatcgagatatccccttctcttacaattacctcgtgctcacgcaaaattgtcattgcagcggcaacacaggtacgtcttgaataggtatatgtctgatcattgaaagatcggaagaggaagggccgatgaatcatgataatcttctcggctgccgtgatagcgagacttcgtcgagcgatagccagccatgggatttgtgcttccttcgttttatccgcacgcaaaaggaaagagggtatggcttttacaatggccctcattttctggtctatatgcaggatgtgttcgtattgctctcgcataggctttctggatttcatcggaccgagtccgtcaactagaccgggcatcaattctgccaaagtcacgagcacacggatgtaagtgcttatagtgggagttgtgataggcatatcagtcaagtcataatcatctgcgttcatgggagggcctgtcgagaaatgcattggagatatactgtaggtgtcggtaaaaggaatagcgaaatggtcctgaatgatcatttggcaccataccctcttccccacttctcgttccactctttcatcccattcttctttgttttgagcaagtttcgttgattgatcctgaattttgtggatcccaaggcactcggcaatgcgcactgcagcattgaataaagtcgcgttcagctgactcaatccaagattatgagcgacctcggtcgatatgacgattgcttgaacagagtacacggagaggttgctgagaaaatgtgaattgtagagggtctgcaccatagcagagaacagctgatgtgtagattgtatcccctggaggtcgacatcaacactctcttttactttcgtactatcctggattgagctgacggtggaactcaagacagaaaggtagagtgctggccagagagggtcatcaaatttcccagtttcccagaataactcgcactgctcgagaaatgtcggaccatgaatacagttatgatgccaagccacatgacataaatgaaacttgatcagcttctgggcatctgtcgcattggggaaaaaagagcgcagctccggactaggatcatagactggaagaggactcgtccctgataaagattgaagtccatctttgcgatactggcacgagcacgtcctgtgagggaaacatccggcagaattacgaccccaagcaagatgttcaatagccgtgagaagggacgagtcaatttgatgtgatgtattttcagtcgaactgtgggacactttgccaagtgcatggttctcggttgtacttgattcccgttgtgtcgatgtggtgtcggatacctccgattctgccggatccatgccggtctccagccgaaatatttgatttttgatcttttgaatgacaagaggcactggatcagacggggctgattcgaggtccgccaaaagcgaatgtaaaaattgaatctctgacccatgttgcacagcgttgcgtctaagctgaacgatttctattgagcacttcagattcaagcgtttacatctcgaacagggattttgtttgtcgcatttgcgcttgcgcttcgtgcattctgtatcatgtcagtcgcctacgagacccgagtcgcagcagaggatcggcatttacctcggcaggcttgcggctgacgctgcgatacacggaccctggtcgcttgatttgacgcggtgtcattcattgcccgtcagccttgcatttgattgcctctattttgtcaatttgatgagttggataactccagacctagattttccgttggtactaggagaagtggaatgtgtgagagttgggggcgggagagtctgagacttggcactgataagcacttcgatcgatttgggcaactattaacccggggacatccacaacatcccgaggtcttaaatctcatcagttgttggtactttattcttgtgtatgttatccctctgtcgcttaaagtattgccacacggtgggaaatttggacttaagttttctacgaatccgttcccgcgccccagagatttcagtcggattttttcaaatcccgcaatccaaccagcggacttccttcgattttggaaaagtcatgagcatccaagcatgcctgtctagagttgaggaagctaggctcggctcgggcgaagacatcgttctcgtatgctgcgagagaggatagcaaggctttggaatcgaaggaactaattatggtaaaagcgatgattaacatgagtttaaacttggaggattggaggtgattagattcataccttggctggcgcatatcgacacgcgtgacgagatccaacacatcgacaatcgcgttattggcgccttctccgcggactagttgaagttagatatgcgcaatctatcacgctcgcgtaaacatacacatggtcattgtgtgagccgaatcacccatcaacaccgcccgaggatgcgcatgcgccctgcccaggctgaacatccagtcttccacgcgaatcgatcgcacttcgacatcgtggggaagcttttgcaccagcgatcgaaatggttccgaccaattatcagtcaacttcttcatgagcgcgaggcgctcggcattcgtgtctgggacagggattcccttcgaatccgcccaggagatgatgatttgacagtggtaacggtccttgctactattctcgaaattgtttggagtatccagaactatgaagacatcagcaacccgcagaagagaatagagggtttggcggacctacagctgaagaataaaaacacgttcgattcaggatgcgagccctgaaagatgaaaggatcgattgactcaacgccgcccatctcctcggcgctgtacaatgtcgaggcacctagaagctgcactggcaagtggttcatctgtacgttgggatagaggatctcgcggacacgcgaccgtgaaccatcgcatgcgaccagtagccgcccggtgtgagatgtgccatcctcgaagtgcgctgtgatttcatcggctgtagactcgatatttcgaaggtttttattccactgaaagcacggtgttagcgctatgatagtatgagaaagatgagatttcttccaagacgatcatatcaggacatacttgaacatccacgccggtactcagtaactgtcgcaagcgaacgcgactgacgcgaatgcgctccgcggcggggatattatataatgcgtctcccgacttgaggtcgaaaaactggaagcgaccgacgtcgccacgggcggaagcttctttgctgacgaaggtttccgggaaccgctcgaccaggtgctccggcaataattcacgcagggcggggagtgaccaatgcagcgtcaaaccccatccaccactacgggcatcaattgcggagtcgcgatcgaagatcttgaacgcgacatcatggcgctgaaggtactgggccagtacgaggccactgatgcctgcgccgataatcagaatgggagattcagacatggtgggcatgttacagtgcgcagttctagtagcactacgatttgattgcctctctatacaaccccggccctagtttactccgtaccgaatgagtcgtcccaccgcttggcaagtccgcaaagcccaatacgaaaagtatccggatccttctggggccaactaacccgaaaggacacaattaagattttatagggttccatcggcccctgggacggctcgggttccagctcgggcagatttatcaaagaaatggacttgcctaattaggagagaggccaggacaaagacatttattttacgtcatcctctatattactcaattaggattatagtttcgggcgatggtgttgccttgtgctagccagagttggtttaatgaagttacatcttaattggcaccggcgtcgtatccttgactcaatctactcatgtctcaggcgcatttccgcattgtacggagtacttgtacacgcgggatcttcggggtccaccgcccgagcgcgttgatcctgtggatcccgctttatttgggggcattattcggacaaccagtttgaatcagaaatcttcgagaaggatactgtcgcacggaaagcgatcgcagatttctcgagtcggctaataatgatggctattggcagagggcgagccggatgttgcaataacatggctatatattattgccactaagtcagccacaaaggcaaggggtgtagggattacggtgctagcgggaggggcaggcatgaaagaaaagaaaaaaaacatggatattaattaattcgaaattgcgtccaaagagtgttgaccggactccggacaaaaaccaaaatttgtgcgagttcgtcggcgggatcaagcttccttcctatttggttggcttgccctctaaagatactctatactcgatcgtcctctcgatacccccatgatcgggctcctgactagccaaaatgagctcctcgcttggtgttcgctttagctgtggacggccggaagcagttgactgcatgtgcgaatgccgatccttcgaccaattccccatcaagtagcctttgccttggctgtcatagtaataattcttgcttctgtcactggttggaccgagtcctcgcacgaagcctttgagtagaggtgccagatatggaatgcaagtgacaatgttctaatacacaaatcagccattgtctcacttaggtagtaagtagtcattttcacttacgcccacgttgaactcgatcgttccccataacacaagcattgttgagtttccatctccgaatgccacacgttgtatctgagttagccgcatgatcgagcagactgtggtgaagagaccgaggaggaaaaggcacacaacaccggccttctgtgcagttttgatattcaggctaaggagcaatgggatgggaagcacgatgatggtcacgtcggtgatgatggtgtaaatcgcgagaccgtagaacaggcctcccacgggaagacatgtgcctggtacatgggcgttccatgatcgtcggatctgttgcggccaaatgattatcagtgtgtggtcgcgtatgtccctcgtggggagagattcttaccggtgtgcaattgaacagcaggctcaaagcaccagcgatatgacccaacgtagacgccgcgatcacaatccagatcacaattcggtaaagacgctttgaggttccagagatcagccgcagatagctaaggcaaagcgaagccttgaaccctgcgatcccaatctggtaaaatggtcgtcctgcgtaattaatctagttgtctcttgtcagcttgccggtagaatgtaataagtgcaaggcatcaaactgaaagggagaagatattgaccttcgtatatgtagagtaatttgctgctggccgttgcttcaacggcagccctagcccatatcggctttctgcgatggtgagtatgtttcttgcagcaaaaggaaagctggaggtgcctacgagaaatgcagagtgcactgtatatcacactaaaagcctgctggaatcagtcgtatggtcccttgtatcacgcgcaggttactttaccatactaacaaccatcacatagtctgccgccgcccatcgactggctcgcgctcgaagaaaaagtcgcagggaaaccgtgcaaaccatcaaaatggtgagacttaaacatacacccagaatgagacggtactgcgaggcagcttcaatctcgggggaggcattatgtacccagcccattgctaagaaattgtgcgaagggatacaagggagagtatggacgaggacatagtcaagcgtctaccagggcaggcagatagatataccgaggtttctttcaccaaatcattacagcatacagtgataaaagtgaaagaaatgccaaaaatcaccattacattagactttctttggtggaaataagaccgataatgctagtcatgtaccctgtgctcctcgctccatttctccgtactctcccggccttgcagggttgtttacaatattattgtcctttagctcaccccttcataaacttcatgtaactcccaacacggaaaggtcctagggtcttggactattggttctgattcgttgctagttgtgaaacgtgtagccacgcgatccccacggtgattgcgacgttacttacacttttaccgcatcaatccattgtatttcccaccttttcccaccaccatttcttaaattccttttttttttcatttcccccccaacttccctattaactacgttcttccttgtcggttactcaattgttcccagctgcgatgggtgaaatccaacccgaggtagtagcacatccttccgcagatgagattgatgatgccgtggtatatcttaaaggccatgaaaaggaggcgctcgactctccagtcaatctgcgggcactgcgccgtaaaatcgatcgaagattgatcccttatatgttttgctgctatgtactgcaatttttggacaaggtcatgctgaacgtgagtttgactttcaattcagctgtctgggccatattcctaacgcaagggtgatttcgcacatgtacagtatgccgctgttatggggatcaaaaaagacttgggactcgtcggcaatgatttctccaacgtcgccacatggttcttcattgcctacttgatcgcggaggtacccaatggtgagtattatgatttatcttttgaccatcactgctaaccctcgattcacagtatatttcttacagaaagtaccgcctgccaaatggctcggtggaaatgttttcctctggggtgtcgcggctgccgcgtcttctggcgctcgggggtatcggagcctgctggcagcacgcattttcctaggcatttttgaagcgacagtgggaccatccttgatgcttattagcagccagtactacactcgaagcgaacaagcccctcggttcactgtgtggtatatgggtcttggtgtggcacagataattggtggtatcatatcttttgggttccagcatgtgcatcatgccttattagacagttggcggattatgtttcttgttcttggattggtgacgactgttgtcggcggtttaacctttttcttcatcccggatacaccgatgaaggcaacctggctgtctgataacgaaaaggtggcactccttcaacacgtcagcgaaaaccagactggagtctggagcgcaaatttgaacctgaaacaaattcgggaggccgtgctcgatattcagctgtggctcctaactgtgacaacaattctggtgtgtcgcacattccacctttcgcccccttgcttcaacatcccctgcagttctattgactaatactgcatagatatccgtgtcaagtggtgtggtgacgacatattcctcgacattgattgccggatttggtttctcgggtcccatctcggcgcttctcaacacgccgtcgggcatcgttagcatctttttcacacttctcgtcgggtttggcatccgcagaacttccaatcgctgggcatggaatatactctgtaccattcctggaatcatcggcgggggcttactatccttcctacccaaaagcaacaaagccggtgtgctgatcgggatttatcttgtcaacgcaattgtagctactcttccgattctataccagtggaccatggccaactgcgctggacataccaagcgtgcatttgctagcgcgcttgttgctgggtctttctcggtcggaaacatcattggtccacaaacattccagtcacacgatgcaccagaataccgaccggccaagattgctgttcttgcaactcaggctgcggctgctttactgtctgtcgtcctctttttctattacaagtggcaaaaccaccgcagagatcagactaagagcggtgttgatgcggcggaccagactcggtgggctgggctgactgataagcaaaatcattccttccgttacgtctactgaacatttgatggatcggggcttgaacatatactgtatataacaccgtttgcttactctgtttggctcaaaaggcatttccttggcctgccgtgagttttctggactaaatattcccgttattcgagatggaattggtagtcattgttcatagaagtcaaggcgactagccaatttctcgatgtgaatccatctctaccggtgctggctcggtgttgtcttgtatttcttcggtcggtttgaaataaaagccatagattgatagttaaatgtaaaaatgccattccgtaaatcggaaacacctaggtacttttttgacatgatattgacacacctcaagctaaagtatacactttgcctataatgaaaatagcaatctatcagtcatctggatgtccttcgtatctgcacgaatcccactgccatgtcgtctatacagtggcattcgagcctcttggcagctggtaagattagaactcgtccgataggttggggcgcatcctttggcttaggactgttgtatgtgacaagaagagcctgtcttcaatcaaaacttcaagttccaggttttcagacatggcgtcgagtactatgcacccatggtattgactcgatccctaatatgtaaacagattgttagctcacagaggaaatatccatggctgggcactggtcacaaagcccagatctgaccacgaaaggtgctatgtgtgagcaaataggccactccccttgaatcgaagtatgtagagatggacttcatgccagtcactatatcattgagtattgtagaggcgtcaatgtcgagttgttgaagtttctcaacatactaaaccagccgccatgggatcgatatagtgtaaacgtgcgtggatggtgtcactggttagatgaagcgtcagcatgcaaatagaatatgggaatacaggcaagtatggttcaacattcaaaagatggaaaagaaattggtacagcaaggaaagaagtgaagaagcataaggttcatgatagaatggagcaatgaatgtgggaaggtgaacatcggtagttggatgggacaaatgagctggagaagatgttgcgaaggagggaaatgaacatgatcggaaagaaggtaaagcctcagggataaaacaccgggggggagaagcatgaaactaacatagtatatcaataacatcgagaagaaggaacactgctgaatacgtgtaagagggaggaggaatagcatcaaggtaaaaagaaggaaggaagaaatatgtatagcatcaaaaaaaatccccattcatctagaccgttcctagacctcaggagaggagtatctcctccggccattctcctatatgcctccacaaaccgtccggaatacggcatccccccaagggtgggagcgcactaccaaacaccctagacacgtatgtctaggccgaaagcatgctttgtcgctgacccaagggtgtttgccttgcatactgaaatgcttgtagactttcttgagagctttagcacataggagtccgaaccgacagtggggagctaagcaatacccgttaaggccaaacgcccgttgagaacgcccctcgcaagggacgacccggtcatactaccgctgggccactggggggggctggttgtaatattggtgtttggattcttcatataggacaaaaccgtaaaaagatatgtcactagagaatgttagagcttcgactgctctaccttcctggcctcgtgatagattccgaaacgaaattatgagtctaggtagggccatgctgctatttgcaaagtttcaaattaattcgaacataggatggtggtggttgataaacactttgatagcagggtacatctattcgactcccaaaatcgaagctattcggacacctattttcggaaggaacgacgacaggatggatttctgaatttcaagatcctgcgttcgatccctggccatgtggaataatttgagaggtgcttttctatattttctggggtttccaccatcacaatagcccattcattttaccatcaaaacacctacccatcccacacagcgacaatgaagacacccgccaaggattacagaatacccacttgcccttcagaaacccgagatctgagttggcgagatctaaggcgagtttgaatatatgtaatagtattactatcaattattctcaacatcaacgtcagttcccatgacctttccgagacttttctccgccgtctcccactctttattaattacattgattacccagtcacccctgggtcggagtttgaatttgacctcctttggcattgtcatgaatcctgccacgaccatcgcccatggatccaccagttccccatcagcgggctcgatgtcaaacgcccacaggagacaagcaacatgcatgaaagatccatcggtagcgaccctctttccttggcagatccggcgaccctgcccaaagaccggcaacggaagatctgttcgtagtctttcctctccgccatcatcgcgttggagccaccgctcgggcacaaagtccccagtgtcgcctagcttgggatcaaataccttctcatctcgaccgatggcccacgcattggccatgagcgtgacgcctcttttaatcttgataccattgaactcgtcatcccggtccgccctacgaggaatggatcccggtgaaataggccgccaacggaaaagctcatgcataatagcgtcaataaaagcgagccccgaacgatccgagaacttggggaggcggtcgcgcccgacgacttcgtcgagcaaggcgtgcgctcgcgccatgaatgacggttggtgcagcgctgcaatgaacaaccacagcagctgccgcggtgaagtctccataccaccctgaatagatgttgcgagggtgaaagcgaggtcgagatcaggaacaccacctttggagtacttctccgctgtggcgatggcttgcttggtcgagttccagcctgctgagtctctcccatgccggaacaagcgcatatagaggtccacctgcgtggcgtacagcttatcggccgctctcttccagggtgacaaaaatgccggcaggtggcgcagaggcgggataatatccggaataccggggttcgcagcaagatgggttacctgggtttggatgtggatgatctcatgcaagatatgttcttcaaagcttgggatacgcatgccataatgcagagcaagtatgacactcgattgagtgcgttcaagcagtggatagatggtttctgtgctgattccttggggaaactgacgtgtagcatttgagagatcaaataataactgtttggactcgagctccatcaaaggatggtactgtggggcggcaagagcgccgagactgggcgctaggatacggtggtggaacttgaggtgatcatcgtagtcgtgcatcagagtaaattttgactgcccgggctcagctccggtgatcatttccatgctgacggagggcggacggttgctgtaccactgactacggcgactgaacaactccgtcacagcctcatatgaattcaacaccacaatcggtatgagcccgaagagcttcggtactgcaacaggtccattctctttcgtccatgagtcccagttcaaaagcggtttatcaattggggagctatggagatcgccgattagaggaagcttgaggaggggtttattttcttcatccctttttcgtgtgacgatgtagagcagtgtcaacagacctaacaccaccgcaaccgtgataggagttgcagccataaggggtattggagtttacatatcagatgctctattgcggaggaaaaaggggacgcagtcttccatagcgcaaacatgtgcatattcggttactgtgccaagctttattatctctgttagacctcctgcaattggttttggaggccaaaacgcgctaagaaagcgatggactcgttgtgactgcataagcggcatttggcccaccaatgactgaggatcccggagactgtcggggagacttgtttctttcatcattgaacgtgacaatactcgtgttattgctagatctctcaacctcaatctgcgcagaatttaccaattactagttactcagttactacaattaatcataaaaattcaggttatctgatatcgatgttccgaaactagacgcattgtcgggcgattttggcccccacggctaccttggacatccctgctagttagctgcaggttggattcaaattacctatttaacatcgttctcctatttcgcttcgctgggttcccttcgacaatggagaatggtcgttaccttccctatagagacgccagcccaaaggcaggtcttgggcgtggctatcgctttctctatcctctctgtggcagcagtatgtctgcgactgctatctcaccatcttgcgcgtaaaaaatggacattgagtgactatttgataattgccgccggtgtgagtattcgcccaatcaactcgaacaatatctactatgctaaccaatacagattttagccgtcggtctccagtccattagcatcaccggcgtaatacaagcaggcatcggctacggccatgtcattacaattgcgggcacatatggaaccgagcctatcaccaaactccttcagctgatcgtcccattgcaatttctctgggttctgagtctcagctgtacaaagatttccatattatccttatatcttagcatcttccccgtcacttgggtcgtgcgaatctcttggataacaatgggtgtgattgtagcctggactattgggacaatcctggctggatgtctgatatgtcggcccttcgctttcaactgggaccagactattcccggaggatcgtgtggtaaccaggttacctcattcacggtgaccggagttatcaatcttattaccgatattgttgtgctggtgacacctatgcccctgctatataagttgcaaatggctaggtataagaaagtgacgtttatcacaatcttcggactgggaggcgtgtaagatttgcacaaccagtgaaagaaacacaagaggctcttgctgacctagaatatatgtatagcacatgtattatcagcatccttcgtatctccatgctctccacaatggacttcaccgacatcacctactcgattccccgtgccaacatcttcagtggtctggagccttgtctcgccgtcatcctcgcttcgatccctatgatgcggcccctcctagggcgttcaacatacacccccgaggtaacagcccacccgtcaaaaaagtcttcgcccccatctggaaggtctaggtctgctggcgatagtgagttccggccgcttcaggatgactcgagtgagctgtgtttacggccaatcgggccaaagcatgaggtcagcatcgcagttcaaaccctcccagagacgagagggataccccgtggaagcgaggactccttcgaagccggagagagcaggggtatggatcagatgcagaaaggaggctggattatttcagtaaagcaagaatgggctgtgttgcatgggcggaagtaatatcaagaccttccctagaaatttattgtatataccaaataaggaaatatatgtcttgctggtcaggcattcaattcaaaatgtcttctatggcaatgtcatagcgtagtctgcccagggactaggattcatatcttcactcccggcctcccctgtgggaatttggcttggggcctcaaccccgtgacggccagattcctctggcaggcagcttgtatcatcgttagccattgaactgaatttatctgggatggattcttactatctgctgtcatcttcgacaatgacttgttgccggtttagaagcctgggctgtgttagtgggagtatctgtgtctgtggcatgatgttgggatatgagacagttgagtcaagatgagataggagtcaaggttgattgaaaatagagagtgaacgaggttaagttgagaagagagagcaaaggaggttagatagctgcctgtgtaggagcgtgttattattttgttcagagatctcccattgttagcgattatcttttattcttcacattcagccctctcatgtacacttcaagcgattccccagcactcagattcaatatcatcacaatcaaccatggagtcttcatccaaaacattccctgcacccgtgattggagaggatgaagaccagcctgggttctgggcacatagtgctctcaataacccatagcctcatgggcgacgagttcgtgaacgctcggggactttgctacatgcagtgcaagccgcaccacttcgtcgtgggccagccttacgcactttgaaaaattgggacgatttctattatttgggctccaaaatcattagaatcaatgcggtcaaatgtcatcggctaactttgacagaataatccaactggcagaataaatatagactaggcctaatctagctagacgatactctctattacgggggaagagcataaagagggaaacaaaggcaatggagggggaggggctcttgttcacgaccagatcaactcagctagttactaaagtagttgcttaagcagtttctcaagcagttttgcaagcagtttctcaagcagtttctcatgcagttgcttaggtagctgctaaattaattgacgatgtatcagttgattaagcagttaataatgatatgccaaaagggacttaattttattagtagtttacatacaaattgtaggtacctaggtgctatgaacgctaaacctaaatgggtcacttacgatataatgaacaaacatctcatcttctccaagcgcccggacaagccgaacagttgatgaaaaggagttcgcatcgatcgggggtagtgtaagcccaatgacactgtgcaacgaggcatatgcaagcatagaggccaagtcgcgaggtccaaatattggaataatcatgacgttctgcaatgcagaactaccagcgattaaactggcaagaacagatactacacttgatctaagccagaggcaaagagagctgaagaagaaagaaaagaagaagaagttctgggggcagggccaccttcttataggtatcctgagggcggtcggtttatgccactattcacaaataagacaaacaacgatataggctcgcttaatgtaaatggtaacgtgatgactaagacaatcactgttgatatagctggatgttctagctcacattctatagaatgctagcgatggaacaagatcaaaaagtaatgcgtctgcttgactatttgtttcaggaggaaatgatgcagtcgactgggaaaccatcccaaggttgcgcatagatatgcgctcggactacccaaaccgccacgccggagatacccaagatgcccaaggagctagatgagacacttgcaaagagatccttgctcgggcctcgcttttcttatggtcattcacataatcatgcggcgtcatactatatctatatcttacgccaatttttcggtttcttttccatcgccgggcaggacccttgttttgttttccttcccttcttaacacagacagatccccctcaggaactcatcttcctcaaacactcttgattctccttatgcacatggtgcctacttgtccaaatgactaaatacagcagaacagccaatgctgacggcagcgagaagaagccatcaggcataggtcttgctggttgatgtcatgaagaaaaggtagacaaggctctcctgcaaaggatggcaaaggaggtcgagaccgctctggagaagtatccaacagttgccatttccagccttgagatcaaagatgtcgagaatgcgttgaatcttcatctggaccgaagagacaaagagcttgagcaggttactcctattactccccctccccccccccacgactcctaggtatggtattatcaagatcaaggtatcacagagctaacattttacagtggagtatttgaagttgatcgatggagcatcgaaccgatcgccctccacagaagtcagtgtgcgctggaccatcgacgccctgctacttaatgcccattcaatcgcagcaaagcgcacacctgttgcacgccctatcgtccagagagatagctcgtacacgcatgggccggtacgattgaaggggaagttgataatgctctcggcacggacagactacggagtctggtacggtgaaactgaagaggttgctttgaatgttgtgattgtgaaagctaagaacatggattcggattcgggcgtagcgcaagccctaggctatatgggtaagtggtcgacaatatccattatagtaaaccacctgagcagggacgctaactgattcaataggctgcgtacaccgagagaggaagagtcttcataagcaggactgcaccatatacgggcttgtaaccaccggggagactttccgcttccttaagatttcaaatgactccaaggtacgtagttttaaattcgtgttagctattatctcatctaatatatatcagtggttaacgtacgttttggatgtctattcgtgcagcctttcagggccatttggacttcttgtcaacatattttgccgtgccgctgtgatgtcccctgcgcactcaaaggagagctcatgccaattccaccagcaagaggcatccgctgatagcgcccctcttgagaccgttgacaaggatgataagaatagaggactggtatgattagcttttatgtttagtgtagtgtcaattctacgcttttccattttcattttatggtgcctttttccatttgagcattgaagattatcgatagcttacgcttgtgtctgcggctcctggatgcttaaattatttcgtgttgctcagacctttcctggacctctactatgtataccaaataaggaaatacatgccttgctggccaggcatccagcttgtcattcgctctttccaacactgtggttggtccattgttctttccattcatattcctcgattgtttatactacattgtctcgcacctgcattggtttccaatttatagcctcgcgtgtcaacaaacctcttctactgaaaactatcttctccaaggaacgcttctcgagatctcttcggtaatctacatacagaatgttattcagatatcttctcgcgttggcgatccaactatgctgggttgctctcgggcttgctaaccaagacgcgacaattgtctgtttaccttccccaaaattaccatgataccaaagaaactaacaacagacagacgatcccatggatcacggatgcacctgattacttccagggctacgggggcaaggccataggcgccgtatgtatcctgtctgcctctcctgtgatacatcattgacaaccaatacagaaagatggaacaacaacctacggaatcaactgtctctcggaccaaacagcctgccacagatttactccagatctgaccgtcatctacggacccagcagtaagaacatagcagccctccaaataggacatcatactgacttatatatatagcatacgacatgattgccaacggctacagattcgacttcacctcgggatgcacgctgatgggctccccgacacccacaagcgcgtcatgcacagaaacaaagtccttgcacgaagctagctctatcacatcggccacagtggttgttccagccacgggcgacgattctaccctcggaattttcccagcaaccttgatcgtgacagacactggagacttccctgtgccttttaccgcgactgaaaccaaaccttctgccaattctcatgtttcaactagtgacgcaagtttgactgcaccttcgacagcgaccgcgaccgcaaccactgatcccctcagcttagcttcagttgggttcctgaattcgacagccatgacaactggtgcaccaacttatttcggcaatggcacctcgccggctgacaggaatggcacaacagttacggtgactgttcttgctagctctattccgtgtcactgtgaatgtgactgcagaggaattcagaccactaaggccactatcactgtcccaatagcgatgaaaaaccacggagtcaagacggctacgcccgtaggattgatgtgtggaatggtagttggcgtcatgttctggatttgaacttgagttgtcaatatgttcaccaacatggattttgccatttggatatcaaccacatgatgcggtggatttgaggaacagaatagtttgaatctgaggagttgatttacaattatccaatgtacaacataggaataaattccgccagggcttgttaaaaatagaaagatgcttggtaacgcattgataatccgcaatgcctctgctgattaatgagatcggagatttgtcaattccgtccgaggtgggcgcggcactctgattggctgtgattggccaatttactccgagatggagccctagagatggcgggatggagaaagtgatagaaaaacgacgtggatttatggatttatggatttagggattcgcaatccacattatgtataaagcccccatcccagctcacctgctatttttccttctcggaatcgctctataccacttcaccccgctcctaatccacctgtctaccctcaacaccttcaaaatgggctccactcaacccgaattcaagaacgcggctacctccactcttttcgagttggtgaaggctcgccgcacatactacgaccttaagggcgagagccccgtctctgacgatgtcattgatcgcattgttcaggacgccgttctccacgttcccagctctttcaacacccagacctcccgtgttgtcctcctgctgaaggaggagcacaagaaggtgtgggatatcgcccttaatgctctagagggtctggtcgctgctggccacgtccctaaggaaaccttcgagaattccaccaagcccaagctgaatgccttccgcgctgcctatggaactgtatggtcaccctccccaatatgacaccattccgtgtcaaaatggcgaatcaccagcttacccgttaacacaggtccttttctttgtcgactatgagtcgcttgctcctatcaaggagaaattcgcgatctacgccgacaagttcgacccctttgccctggagtcgaatgctatgtctcagtaccttggtatgtgctcttccccggcctttttgtagaaacaagtgggttggaaactaactatcaccaagtctggactgcacttcagtctgagggcttcggcgccaaccttcagcactacagccccctcatcgatgagcagattgccaagacttgggacatccccgcctcatggaagttggacgcccagctggtcttcggtgttcccaactctgggcccggtgagaaggccttcgctcctatcgagggccgctacaaggtgttcggcaaataagcacatatagatgcatgcatattaatttagcaatctagcaatctagcatttacgaatgaaagagcaatgacttggattttcggtttcaagacaattgtgcaaatctcaatagtaggccgcactacgtagtccaaccctacctcagcaaggaggatctgcatgctcgatatgacgtgtctgcatgtaaggtgatcctgatcaacaaagcttagtcgaacatccaacttcatagagtttgagaccctgaagatcaagtgcagatcagaagaaacctcacagaaacctcaatgatcgtcacatgggcaggcacaaccaggttcggctctggtaaaaaatccaggacctcgggggttgtgcctgattagtaagaatgtttagccaattaggaagcaggcgcatatttgacaccaccaggactccgtatacagcgctatagttaacaagatggctatttcccattagttagccttaaggatttacctactctagcttctgtttcacaatgccgagatttcgggtctctcgagctttttacgagtctccccgatcagctcgggaatagcggtctgacaataaccgaatattagcctgatgcaaggccccgtggtgtaccttcggccacggaattcatattccgccatgccgtgcatccgattggttgaaaaatctatagaaagagattgggcatcaagttatattatcaagtcaattgcagatgatcaaagctgacgacagtgatatacatatgattcgcaattcattctctagtggcatccagcattccaaacataatcccgagggtagatcttgtatcttgcaattgattgcggtattgtcatttttagatagaagcgaatagaggatctcaagggaattactatctgtaaaccttggtggctgagaagaaattgctagaaagaagtataactatgtcgacatgactatatacatacctgtcgttcttgaaacacaaagtagatcgactatttaagagtatacgcaagcttccgcaagggattccgatcaccacgatgtcatgaaatatcgatgtgcaggaggtacattgtagattgtacgttgttgacatacatcgatcatcgtctataccttgtagtacaaagtaggtgcctgaccttatctttgtggataaaatcgaaaactccaccaactccactccatctgatcacaaatttagccgtttttcgccttcttctgaataatttttcttctcttcttcaacgcctcagatcactcatagtaaccttagaactatcgtgtctctgacaagttgaaaatgtcaaatgaaccgcatgcgggtgcagacccccaggccagcgggtctcaggatctaaatattacccctccacaaggccaagatggaggagactcagcgccagcatccagccggtcctcaatgtcctacacaaggacatactcaacaccggcaaccggggcacaaacccccgatccactgatgggccacaagatcgtggacaaaatcgccctccaagacctctccatcaatgatctcaaccgtgaaatcgagagctatgccctcgatacaacaggcaacatgaagaacagaaaacttccagactcggtatcccgacctcatcccggcaccgatgaagaatcgggatctccgattcgcagcaagcaaggcatcccacccgagctttcaagcttcacagccgaactggtcttgatcttcgtctgctcagtaggtctaatgctcttctccttcctactgggcgacgtgctcgcaccgcaagaacaaatcaaagcagccctgggcatcaccaacgccgagcttccctgggtcatcggcgccttcaacacagccaacggcctatcggtaatcatctccggctcgctaacagacctactgccaccaaagctcctgatggttggagccttcgcctggctcgccatatggaacctaatcggcgcattcagcctccagccctctcgctgcgtcctattcttcattgtgcgcgccatgcagggtctctccatcggcgtcctcgtctcaggaagcatgagcatcctcggccgcgtctatacaccgggtattcgcaaaaaccgcgtgttctccgcaatggccgctaccgccccgctcgggttctccctcggcgcaatccaaggcggtgccttgtcccgtcacctcccgtggatctttggctcaaacgccattctctccgtgatcttgtgtgtggctgcctggctcgcgattccacccctccgacccatggcagatgcatccggtaaggaagccccgtcgatcaagcaattcgactacatcggcggcttctgcgcggccggcggctgcgtgtgccttttgttcgggctaacgcagggccccgtggcatcctggtccccttacacgtacgttttaatcatcgtgagctttgggctcttcatcgggctcttcttcgccgagcgcaatgcagttcgccctctcatccctaaccgcctctggcgcacaccgggcttcactccgttgatgatcgcgtacttccttggcttcgggtccttcttcggctgctggcagttctacgcaattcagttctggctgcgtatccaacacgctagtccgattattaccgcgctgtataatattcccaacgcgctagtcggtgtcctggcgacattgattgtcgcccgcactttacacctcgttccgggtcactatatttacgcggtatctatgctggccttcacgttaggaccggcgtttttcctgccgcagactgccaacaccagttactgggcgctttcgttcccgggtcttattctggtaacattcgggccggatcttgctttcgcggcggcttcaatcttcattactagtaatgttgaacggtcctatcaggggagtgcgggtgctttgttggtcaccaaccagaacctctcatcagcgattctgactagtgttgccgatgctattgggacccgtgttgataaaggcccgtctggggaaattggtcttgatgggctgcgtgctatttggtggtttggcctcgcggcgcagttgctcgctgcgttgatcacgattgtttgggtccgaattccgaaggaggaggagaaggagcacgttacttgatttaaatattaccttgtcattagatttagaaatacatgtcttagatcatgccttagatattaccccttccgctctaaaagccatatctaattttgcagtaataaaatcgtttcatcatactactagagctcgatatatgcaaataataaaaagaaagacttgtcatttagccacccgtcccctaaatatatacatcaaaatactgagcccaaaaagacatgttgccgccaaagtatgccgcctaaatgagatcgtaaatattaaacaaaaataaagaatacatgtatcgaaactaaagagaacaaaaaagcatcaagcatccataaccaccttatgctcactggtactattcttcggagttgcctcctgcataatactcatgctcatctcggtggtaacctcaataccgccgagcgaaatgtgactggagtggtcaccaagcttaacattgatcgaatacatctcatagtccttatcgtggttataagtaaacatctgagtatggtgtgtcagagcgcgagttcccgtgaggtttgtccctgcggatttattggcatagggattcgagctacctccggaaagcagtttagggaagatgcggctgatgataggtcgcaagaacgggagacaggcgcacatgatagcgacgttgcattctgcggcggtccaataggcggctgcgacgttgctgtctgttcggtaggttagcttgaggagtcgattggagaggacaagaagatgacatacaggaagtatcggggctttttgctacttcacgtaaactagataggcggagaatgctggtgactacaaccaagagacccatggcaaagacacccattaaggcgatcttctgcatgcggggcagctgtagcttggaaagtagcggcatcggcaagactagtagtgctatatcggttgcaatattcattgaagcattgaagaaccagacagcctcgaagctgagacagctgcctggcaagtccttgttccaaaattttgccacagggacacagtccacgaagccgctcacaatggcccacgacgagtaggcagccacgattgctatcatgacataacaggcgaggcgaaatcttttggcagggaagatgcgtagatattggaggagaatggagaatttgctgaatgccaagctggcattgtacatagggattgcagcccacaaacactgagaagaaagtcaggttatttacactaacaaagaaaagaagtgaagaataaagtgtaccttgagttgttgctgtaagacatgactggaaagtagtgccgagtggacacccattttataatgtagttctatcatctatattagtggggtggtttctgaattcacctctgcactatgaacgtacgggcagcgacgagtgcaagatagataatggaaaatgtctaaacatatgttttattagcgagctgatcatctaactccagacgtggcttcaagaggcataccaaagagaccagaatagcccaatcttcacggccagcaattttcatcaatccaaatcgtgcatacaatcgcattccgacaatgagaattgaaatggctgttaggactgccgttaccaccaatgcccgtcggccatgagaggccccaccatcatcatcctctcgaggaagcaatgtgtgaattgaaccgtgcatattaaatatcgaagtcaaggaccaaatatagcgagagtagttaaaatgagctcgtggctatttgcagttgggtcaattgatcatgtccagcaagcgtagtggcctcggatagatgcagctcactgcactaaaattgggatcgagagtgctagtaacgtgggtgatattcgaatagaaaacaatccttctcggagacagtcgcagagacagggagcagggacaaactcctttgagtatgttatccaagccaatcattgtctgcacaaagcgcggagaagcatttgcacgtggcattgcccaatctgggtagtcgattcataggaaacacccctatttcgagtagtttctctcaatagcgccacaccagccggcggtcctatgttccaatctaggtcgctagaaagctttagtcgatgaagcgataggtccagtatatgccgtgtaatgtgggggcttgtactctgcagacaaaacttccacacaagcgtttggcgcgggaacctggtcgccgaatctccgccataggcagggattcccgccgaacaatgttgcgaggggctcactgaaaggggtcaggattgacatgtgtctgctaattccgttataggaaaccccagctatcatttcaagtttcctcgttgggaatggaggttgagaacggggctctgtgtcggtacataggacccacttgggtgggtatacggtgcagatgtcactttcctgaagaaaatttagtgcaaggtggggttgcattggcgtagtgccgtcattctaatgatattgtgttgcaagccggatgacccgaggtcaggactggcagtgttgtattgcataggcatgaattgttgagacattctacgtgtattgcgagagccaaagtagagcatatgcattagaaacaattcatgatcgacattggacaaaggacctcggtacggagaaaaagggaaagaaagggagaagtaggatcgacagaggatctcccgcgccacttcctaatccggttagggtatgtcccctttattccaaggtcgctcctttattttgatctccagaactattcaagtcttgtacttcagtattcagtactccgtactccgtactccgtattctatactggaataattcatgatgttctgtttgtccattcactcgactgtttcctttgccatgagagatcatattacaagtcagccgtcagacatccatagatggcctcgggagtatcttcttttgcagtccctgagttgtgaaacaaagcaatgatcgccacagttcaataatgaagtggatgacctccacgcaaaagggtcatgaagcgaaccagcgcacagaacttgtcatgactttgcaaagtgactggctacggagtattatgtactgctagacgctgtccacagctgcgtcacttgcatattcgctgccttgggatattttgggatgcacggacaagctgattgaccaagaaagactacggattttgttcttgggtgcagtcccccggatacaatatacgattctggcgtcaacccatagttagaatatagaatatggccggtggaaaagttgtgaaacattcaaattgacgtttccgtatataccatgtgattcaatagaacggtaagcatctgaaggtggctagtcgagatctaccttatagattcattgtatcacaatcacttccacttcggaggctgaaaatcccagactggaacagtatttggccccgtctattgtggccatatatgtcatatccaatataccctctcaatctattctccagacagctcaacaacgacctccccttccctcccaagctccgcattaacagccgtccccaaatgcgcactgagctcgcggatcttatgactaacccatccatgatccgcatctccagaatccaacaaacgagcctgaaaccgctcaactcgcgtaggaaagatctccaatctctccaacccaagcccactaccaccacccttctcccgaacaacaaccctccacaaagccccaagatcattcctatactccgtattcaaagcataatcatccacaaagtccccacaaccatagataataagcttcccacgataaacctccacgccctgaacatgatgcgacgaatgcccatgcacaatatcaaccccacactcatcaaccaagaaatgcgcaagcgacgtaacccgcgcatccggatgccaagcgtaattcggcccccagtgcaccgaaaacaccttcaacgcaggcttcgtcgcctcagcgccaacgagcatttcccgcagccgagcgcgcgtgtcgcgcgtgtagtcgaacagattgaatcccggcacactgatccatgcgtgcgggtggtcggtggctgagtatatatgcactgtgtggcggtgttggctttgttctatgggctctgaggccctgggcaaatataacactgcgggcttgcgcgcgccatcggctgtttcgcccgcgcctgcgtgggcgatattcgccgattgtagtgtttgtaaagtctctgtgagacccgatatgccgaagtcgagggtgtggttattggcgagactggcgtagtcgacaccgccggcgtgtaggatgggacctaggtttgctgggtgcatgcggtagttgaatgccttgttgggccatggggttggggctgttgtcacggctgtttcgaggttgatgcatgctagggtcgaggagtggaggatgcggagggctgtgccccatggcgaagtgggtgtgtagtttccttttgagaaaaaggttgggtgggcttctatgaaagttttgacgacgcgttcgtcctgctcgttggtgacgtgctttggcattagttggtcgatcaggcggccgagcattacgtcgcctgtgaaggtaagagtgaaggattttggagtggacatagtagagatggtcagtttgaagaattgaaattggaattgtttagagcgtattggatatatttccaattgagttgatcgaggttggatttggacattggatcattatgacatcggtcttcatgaagttcaagcatctacttgtaggcatttgaggaacacgtggaaatagatatcgttttcatattaaaatacaattcatttgacacacttttttaagaataataacacagccagggataggatatcccagtaacgtgagtggtatctttgtgcgccgttgatctcacgagaaacaccgattggcaaaacattatctgaatatcattattttcatcattgcttgggcggcgtcgaatctatcgtctcatctctgccagctcgcgctcctttgctctgagcatctcgcgcatctgctcagcttcgcgttcaagtcgggcacggcgatcaaccgagtctccaagagatgcaattccaggcaaaggctgtgacgggtgaggtgaaggggagatagaatggtgaataggaggtggacgtcccagattggtatccgagcgaggctcgccccgaacatctgattggttcagaatagacgagatagagctgagacgaccggggggagtaggattggccgaagacataatcggaggcagttggttggatcctgcttccaatgtagatggagcgggtagagcctctgtcgcagtctcggccaatgttcgtttcttggggaggttgatggaatttggagaggcggaccgtcgcccgtactgaggcgcgggcgaatgccccagccgctccacccccaaaggtttaggtaggccgtgagagatggagagaccatgtgcaagaggcacggatgaaacattgtaaccagtgaaatcaaccggccgtggcgcaaaatgtaaaactcgaggtgcgtcttcggattttccaggcatcatcgggtagtgatccgtaggctcgctgctcatatatcgatagtgatcatcatggccatgcgccagggcggcaggcgatgcctccggggatgccgatgagccattggaggaaagggtagcagcggtgggagactgatctcgtagggcgggaacaacccgtttgcgacgtttgatgatggactttttcatgttggtggggcgatagcatccatggagcttataatacaatcctgtcttgtgttagagaaatcagatcatcaagtctatatggaaactcaaacttaccacaagcgttgcaaatagggtggccctgttcatcgcgcctccacagaggagtcacagtcgtgccgcaattttgacaagcaaccaatgtattagtgccatcggcagaagcaggggccttcaccggtggctcctcttgcgtcacaggctcaaggtcttgtgctgggttacggccccacgaagattggatggcagccgctccccggggggcggacttgtatatccggttgttgtatgccgggcatccatcgcatccttctgcgccaccggtgccattacaactcccaccgccagggcatgaccccttgcaacctccttccgaggaaccgccacagtgagaccgcataggaggcggtggcttctcggcaccttctgattgcatccgatttcgtttcgtggggcgagcgacattgcgagctttgaggtagagaccgcaggcgttgcagatcatggctcccgtgggagaacgacgccaaagaggagtactttttgtgccgcaattactgaataaaagagacggggtcagtctttatagcctaagtatcaaccgaggcccagtcgaaactcacctgcatgaatgccctagaaaagttgtgtctttttggctgccgggggatgttttctcgctcgggatttcgttgtgtccaatccattgatttgatccagattgacccgatccttgccccatgccatcgtcccggtagtgatctgctagatgttcacgacctgcttgtgctgaggagatcaactgctgcgcagcatccaaatcctccgcggacggttgtcgcattggaacgtcctgattccggggtaaagagtgaagcgcttccatttgtgggatggacgctaacattacaggatgtgatccgggccaggaatccttcggccgtgagtctcagtacgggatgatcgaatatgaacgaaacgacaaaaacgaagggggtgataatcctaggatgtgagggcgatgtcgcaccacagtcgagagcagaatgcaccgtatcactcaaaaaccaaatgtcggtcaagctgacgggttggagaaatatgggaaagtcagtccagcaggcagatatgcagccacgatgctgcaggctcggggagtcgcagggcggacgatgactcgggatcgcggtcgaaaagaagtgaagtcggatgctgccaacctaggagtcaggaaatcgagtggtccgagtagatgaaagtagttgacccgccaccaaaaggtatggagcggcctgtatggaatagtggcgacccgacggcgtggaacagtcaggtgatggtgattgcgacaattgacagcacaccacagggcctggtctgactggcaggcgatcgtgggggacggtttcgttcggggacggtggcccgatgcaaaaggacgattagcgaggcagggattggctaaaagggtagggagctgcaagatggtgatcactccgcgtcactgcaagcgggcacacaagatgtgatgggagcgataaggggaagttcgagggatggaagagatgtcaaagataagtgggaaaccctaaaaaagattaaaaggaaaaggagagaacccgagaacaaagaggcgagaccgaattgcttatcgccgaggaaagggagggttggggtttatcgatctaaggtggaaggggaggatctacggcatatcaatctatcacactttatctatcgtttgccgaggatcgcatcaatctcatctaatcatgttctattttacggcgtacttttttgcctaggggattcgctatcctaatccccaaggaaatctctggcggttctgcatgattctatgttcccccaggattgcatgttgactccaccgtatggcctgatgaagtttagttggaaagtgaaaaattacagtggaaaaggtgggaaacggtggtaaaagtggaaagagtgggaattacacatccccaagtgaggttgcggtggagccctggtaggcaatcagatatgtagcgcctcggattggtcgcaagcggctgactaatcttgtcatcaacactctagcgattccgattggccgctcggagatggaacaagccgaagcgatgtggccacgctggactttgggatacggagtaaatctaggaccgtccgcggacgacaaaagtacaggcttggccccgaccacggagtaatacatcatcgtctccgtgtggtcggtacatatgccagtctccacagccaagaagtccctgcactagttcctttatttatcagatgatctctcaccggcttctccaataagaactcgatcaatcattactccgtagagcatgccaatgttgctagataatgctagcccacgtccaaatatagtacacgtgtctctgtccctttacgctggtatcaacaaaaatatccgagatccagcagaatcgcccattctcctcacattctctgctttataatgacatccttcgatcaaatcgagatcaaggacatcccaaggtcattgcgctcatcgaacatcgcataccacatgctggaggaactgccggaatagacagtatcccaccacagtgtcaatgcgacagaagatcgtcatcgccgcctactcgggcggcaatttagacctgctcggcaccccagccctggtcagattcgcgcatgttcgaaggaggctcgatagatggaatgaactccaacgcgacgtatccgagaccgatgaaggcaatcaccgaaccatcaatgatgcgcaacacgttgtcgtgcagcaggatagaaccgataaagatgtagactgttggcgcaagtgattagccaccgaattccccctcggatctgcagacatgcaaaggtctaacttacagacaccacggccgaggaatgagaagaggaacgacgcataacggtacgcgtagtccggaacgtgagggaggaactccagtccaccaacgactaggataatgttagccttgactattgacgttgcgagttcggattatcgtggggacctaccgagaccgaagacaactgcatacgcgcccaggatgaatgaactccaggtgccggtgaagaagttactgatgccaccgagcaccataaacacacccacggcgatgttgacaatacggctgcataggatcagtactggcgcaaatctatcatctctcacgaagagccaacatacaagatgtttgtgaaatccattgtgtgcttcgttgaagggtttatgagatgaaagtgatccttgggtgctcgcgaatcagtaatgcggagggcgggtcgttaggctgccaagtttcgacaaaggaagattcggtgtcgggtgactaaatcgggtcttcaaaggtgccaagttagctttgacgcgaatatagataccgcttggtctcgccaatcgctcaagtgatgacggaggtcagattcgctagagttcggaactcagtttgctggtttggtaacaaagggaaacgcacctttgagatggaagagtgggtctgagggaagctataataagcaacacacgtttgatcaaaaggctggctagtgtttgaatgaagcagaacaggggaaagtggaaatgagggcgtcgacagctgctgcgctgtcgcaagcagcgggtctgccaaggccactggtagctcacgtgatctggcaccggccagtgcgggtgctatgctgtattcggtatagtgtttccttgatttcttgacatcgggcacttaggtatcattgatacctcgaacggtggatgcgacttgatagtaaacgttaagattagtttataggatactggaaccccgagctagagaagtgaaatagggaagatccagagataaaatgcggcaggaagagagagagaaaacgacggagagttgaagaactaggaaaaccaccatatctactccctatttttcactagttagaacaagatggccaaaatgacattgcctttttatgttgcgagctcctgacaaatgtctagtaaagagatatcattatcttagattaagttctggaatacttgttcgtgagggaaagaccgatgattttgccattcttctcgttaagacccatggttatagtatgcattgtcaaagttcctcaatcacatcctgccttttctccagtcggacttcagagagaccattggcgaagcgactcatacgcacggggtcccgctctagcacattgtatattttacccaaatcagttccaatcccgatctcagcagcagtcttcaagctccgcgaatcgagacaaggagcaatgcttggccatatgccttgaacattgttgaaaaatacctcgactgccaaatcgcccatgcccctgacctccttcagcaatattctagctttgtcgattttgccagctgcctgcttgaggagattatttaaatccccatctgtactcatacgacgtcagactccacttccacgtgcagtataactataacatcgcaaattcacccgcgcagatagaagcgaggacgtaccgtatctctcaacaaccagtttggcgagctcgccgagattggtggcgcactgctctcgataccggttgtaacttccttcttgcaggacctttgttcgatcttcccatgtgcttttggaaagtacgtcgatgtcatggtagtcggcttcgattagttttttgatcgttctctgtgtcaactcgtgcgagatgggccttgctttgatcatggcgtccagcaccatcgccaacactacctcggggctagcattttgtgggtcggcaagtactgtgccatgtagaggaggtacaccgaactcgttcaggattttgttaattttatctgctgcttccttggtcgtaggcgctgacattgtggagaaattgatgaaacgattataatggagttgaattattctcgggttgagtctcaaatcgagtgtttcaacaatcatcaattgacgtcatgatggcatgtacgggccaaccagactttgcaaaattacatgccgagactaaatttccgaacactgtacaacaattgatctatacaacgcgtttcctcacagcttagagcgagatatgttctgcaggacctccttgaccagagccacggcggtatatgcacagccgaaggaggcctggtagccaaatcctccatgaccatagttgtgaacgatggccacaccgtcaaccttgtctttttcaatgcgagtgccaccttctctcagcgggcgcaggccaacgccgtggcgaatgatatccaacccctcaattccctgccccttctcaacgagatcggggcagatgtcgacgcaacgcttcatgatgcgattggcaaggttcatatctgggattccattccagttgtgcttctgataagagccaccgaggatcgtgccgccacctagaagcaataagccaacggtcgaacaataaaaccagcacatgagaacttacctgcagcacgagtcataatgtacaacgcctcatcttccccgtcgtcggtcccggatatcgacatcatggggccggggtcgttgcggactacgacgatctggccacgagcgggatacatcttgtcgtcgagaacaccaccgagagtctttgccgacaggccggtgcagttgaccaccacgtcagctttctgtccggtgtggtgggcattggctgcgtcggcgatatgcttgaagacagctcgtttgaacacggcgccgttcttgacgcactgaccgaccaaccacggcaggtagacggcggtgttgatacagacagatacgaattcctggccgttgtcaattccgggggccaattgatcagaagggaggtttttgaactatcatcatcatgtcagtctgcaggcagtctatggcaccatctcacggttcaaacatacatcaagcacgacatctttataccacgggtttggctgggtcaattccgagaaccaccttccggtgtctgtttcttgatccttcttccggttgtagatcaaggtgtctacattctgttagagggtctgcggatgctgatcaagttctgggccggtatcatacctcggaagtggatgccagcttctgggtacttctcggtgatttccttcaatgctggccaggtatcgcgctcccatttctgatgagcacttccctcttttcccaccctataaaacatccacttgatcagaactttatcgcgcagccggtttcagtcgatcatacggcatatagttggcaccggcccatggggacgcatattcaatatcatagtctccaggcatatgcttcgccaaaacagtaatcttgttggcggggtcttgcgacagcagatatgcggtggtcaaaccagacacaccggcgctgttacatccgttagtagaggctcgaagtgcggtccagtagaattggagctagagaacttgggaggttgatcttaccccagaaccacaatgttgttagtcataatggacaatttgacctggaagttcttaggaaaacacagcacaggtgactcgaaaggggcccgctgtccttaaatgtgggctaagacgagcggggtgaggggagagatagctggttgtcccattcagctgataagggttgccctccagggcaggtggacacccgtggaccgggtggtctgattacctcactttgtacttggccaattgcgggaagtgctaccggggcggtgtaagctttatccaatcacatgccaccaaaaaaaaaagaaataaacggcctgggaactttcagtggagacacggcggtcgaagatttaaaagacaactccgcacttatgcggaggtgatgtgctcctggtcaaagcattggaagcattgttgcaacggaaatctaaagctttgatcaatctcaatgcttttgtttctgaactctcttagacccttgatttagtcttaaggtatcagtgacttcgcctggaccccagcaaggagctccgtaaagtcccgctccatcactccggactccactccgatcgatcacatttgatcctagggctatatgccagggctcttcaattacctcaattcgtggtcagtgttctcgtaaatgactctaatttgagatattttcgagcaggaacacctggaagaagctttgttctgctaaatatagaatcgaatgccctgaagccttgctatacaaagaaacccgagcgatgtcatagtgggcaaacgcctagttgtggccaatcactgagcattagggctcaccgccccgcccccaacactgaaatgggcatcgaagggccgaacaatttcctttttcaaaccacccgcagggcccgaattcactcggcgggctccttttgtttgccattcttagatcaataacttcaatttttcaattttctccatcttctctcccttcttgatcggtctatttgtttagccattcctctatactcccataaatgccgacccttattcgagtgttccctccaatatgtcactcgtcactaatggtggcagaatcgtgcccatacttacgggctctgattctcgcgatcccaccctcgaggtgtctgcgttgttagacggatctcttcctcccatccctattactccaattccttccacaccgaccacgccccgcctgtcgcaggaccaacaagcttgcaaacaggtcaagcccgtgcaccatgcgagcttagaaatgccctctctccaacaaaggggcctttatgcaatccccacggagggagatggtaagccaattacacttgttgcatgatttttgagctctatagtggtctttggaagctgcaccgcgttgttttacttattctgacgcgtccaatcgcaggcaattgtctctattactccctctccgaccaactgtatggcgacacccaccatgcagacgaaattcgacagcttcttgccagtcacatggcttccaataaagattacttcatgcaatttgtcgttgctgaaggtggggagcgccgccgccctaaacgtgcggctgcctctgcgtatgctactcgatctgccgatgtctctgctccctccgaggaggacatggaacggcgattccaaggcatgattgctaccacccgtaagaacggggagtggggtagctccgagcatctccaggcattttgtcaggtcttcaaggtcgacttgaatgtatacaccatggatggtgtttcggtgttccaggatgtcaatgccctcccaaatcaatatcgggatgttctgcacgtagccttccatgtaagtgccttgctgttgtacatgtcatcgagcgtcgtacaatgtcatcaagccactaacgagcacaggacttcaagcactactcttcagtgcggggtatcgagggcaagcatgaagggcttcttaccaagctaaaccctctccagcccttcgaggagggaatcaagtccgaggtcgttccagactccaaagccgacttcgatcatgaacaattctcttcacaggaggaaaaagccgttgatagttatacaaccaacgatgctagccttgctgttgacctatatcctccttgggatatcaaaactatccaagaaggattgggtggccgatatgaccgggagaccattgtgaacatgctccaaagatgtcgtggtgacattgaccgtgcattcgccgcgctcctagacgagaagacagacgtcctatctgataggaaagctgcccccggaattcctatcaaaccaagcttgcaggcctcacgctcttcttctccattcagcacgggtagcaagcggtccgcagaagacagcgacgactctgaagatcctcgtcccgcgcgacgcacccgacctaagaaacgactcctttccaatcttaccttaggcgttggtatctcattcagggatgattatgacgaggttgtctccttgaatcttcgagtaagttctccaaccaaaggtttccatatgggatatttactgacgtttcgttcaatagatgaactccgacactgaagacagtcaggccacagaccgcactcccccgggtaacactaacccggaacaaccggacatgggcgagaagaaatgtcgtcgcagtagacgactttcccgcccgcgctcgagctgatttatttgtttcttgccattctctggctagacctttgagcatctttagcgctttctcttgcatcgaaaaaaaaaaaacggcgttagtgatgaagcgattagtttcttgggtttgcatattgcatagccctgcggggctcgcggcctatgggcttgcggaaggaggcgttttgtctgattatgaattccatggggtttttgcctggggcactcctcaacgatcttatttataacgataccagggtttctttctccccacttcttttagagtccttagctttagctctttttcggctctcttgtttcagtctgggtattggcccatatccagcgtcggtggcgagctgttttcacagctctgtttggtggcttggattattatacagctattcaatgtcacacccactttctggctggactctgtcggtcgtactcattccctaggcccttcctagtgatatagtgaatataggtgtaactcatactttggataggttttactccatgtaacagaacggacctaattatcattctaaaataccacttcaccgcctatcactatgtacatgtatgtatgtaggtattgcgaggccgtcgtctctaatgacattcaatttactatcctagtgcgtgtcatgtacatgaagatatatttatttgatactagtctaaaagaatgtctaaaagaacaccaagcaggattcggcagagagccgggcagaagccaaaacaaatctaatgcagttcgcttgtgttgcatgaaatatgtatgcgtgcctttagtcctccagtaggaacttcaggaacgccaccccaatggcgacaccatcatgttcaatattagctctgctcaaagcatcttgagcttgttcctccttgaaaacaccgccctcggcccgagtccggataatctccgtgatgatgtctcccgtgaattcaggatggccctgaagagtgataaagtggcgcggcacatacataccctgcactgcgcagcgcggggatgagcccagaggaaccacgttcgggggataattaaatacaatatcctgatgcatttgctggatgcgctatttgcgagaaggaaaggtcaggtcaagtgtctgcatatggactcgggtgcatgggtatgtatgtatgaagccttgtgttacacatgacgcaggcgcagggtactcacgatcttatctctcccaaacagctcctttcccttatcggtcaaatccatatcacacacggcaatctcccaaccttggtcgcttcgtccgaccttgctgtttaatgcgcggccaacgatttgatgtccgaagcagatcccgagtaggcggacccgatcctgcgagagaacttgttgagtgaattcgacgagacgattgatccagggaatgtcttcgaacgagttgtgttctggcttatggttactgtgattagtgtatgcattcaatgctctgggcctaccgtgtcaacacgcacttgatcctgttagaagcacggcatccacgtcttccagcttcgggtatttgtcgtcgttgactacatcccaagctgtaatttccagtcctgtttctgggtcgagtctttctggctcgttcaaggcgttgacactagctttgaggagcgcgcggaataccccgccatatccattatagcggcggttgatgctgtcaaggggagtgtcgcattccaagacggctatgcggagcgggggttgcattgttctggatgatttgaagctgcaaacaatgtgatacagttataaaacaaaaagatctagttactccgtagcaattggagaaagacgagacaatattcccttatcttatcggaccccgagatcggaccctgctgaccaaccacgctattcccgatgtggcaaacatctacaaagtatgagccttcagcggatcgcccttttttacccctcggcaatgcaattgatgctgtgttgcatcaaataaaaggatcttgcagccctagcgttggtataaatatcatatccccatacgcccggattttctctcttttttcccttatttttgtgtcaccactgctttcgaaacccatgagccgctgttgatggcgttcgctgtaattacattgcgtgcttgcagaatcttcgtcctcatgaaataacattttcatacatttgtcttcataaattttttttaaaaaatgaccagtgacaacgaggggcaatcatgcccctctgaagccacccctctcctgcgcaagaattcggtccaccggaaaacgagttatcacgatgtctcgtattctgcaacggatgttgaatcagtctgctcatacagagatacagtagaagaagaagccaacgttcgctgtatatccagtgcaagctctgtcgaaggactcgatgttggtccggcttctggggctggctcgcccaaccaacagccgaacatctcaacccaagatgggaaggattacgcctcgagattcattgatatatcaccgacaaggttttggatcatctttagtggtatcatgatgggctacctgatcggcttctttgactcaacgctcatggcttcaagccatccagtcatcacctcctacttcgaagcagccaactcagcctcctggttatcgacggccttcttgttgacatcgaccgcatttatgccgctcttgggacgcatctctgacgcatttggccgaaagcctgtctatctcttctctatcgccatgttcttcctcacgacagcaggctgtggcttagcgcaaagtatcggcagtttcatcgctgcccgcgcgctgtgtgggcttggtgcgggtggtatcttctccattggtcagatcatctctagtgacttggtacgtctcgagtatcgcggtgtctaccaatcatacatcaatctgtgtctcggcatcggcggtagcctcggccttgcctttgggggttacctgtgtgatcatatcggctggcggggtgcgtttctcatccaactgcctttcatcttcgtttactttatagcagccgcttggacagtcccggcagatctcggcattaaacaaactggaatggagcgcatgaaagtctggcagttagtccggagcatcgatatactgggatcaatcatcttgattatatgtgtgactctgttgatcatgggtctgaacttcggaggcaatgtctatccttggagccatccactcattatcatctccctggtgtcatcgttagtcctagcggttatcttggtacgttacgagctgcacgttccacgacccgtgctaccaattgagctcatggcaacggatcctcgagctagtatcatctttggcaatttctttgcctccatgtctgtacacaccatgctgttcaatgctccgctgtattttcaggcggtgaagctgaccagcccaactgcttctgggctacgccttgtggcctcctccatagctgtgactatctctagcgtgagcaccgggttcatgattaactggaccagacgtctcaaaccttatgtcatcatcggtgtatgttgtatggtgataggtggatgtgcagctgcatccatggggattgacacctctcaaccactctccatgatctgcatctcattctccagtctaggtcagggcttcgcatttcccagcttgatggtatctatcctcgccacgagcgagaaacaagatcaggccgtcgcaacaaccactctggggctgtggagaaaccttggcgccgtgatgggtgtggctgtcagcagctggatctttcagaacagtctcatataccagcttaacaaaaatgttactggttttgagaagaaccatatcattgcacttgtccgcaaatctgttgatactatcgctcacttggatccaatccatcggcgagaaggtgtgtctcatccccttggaatgccgatttgatttgctaataaccacccagtcactctatcatattccgccgctcttcaactgaccttcatatctgccgccttatgggcagtcattgtgttaatattgttgggtcgagtccgactaccgcggttggggagaaaggcctagacggtgtccctgagatggttcggtattttgacaccgaagattgcatattggcttcaaatctcagcatgtttcggataaaatgtgttataagtattttaattctgactgtatttgtttgagttgatataaattatgtatgcgtatactccgtactcaaccgtctccgtatatcggcgatcttggcaatgcgacccacctttttttcttgacttctttaacttgacatccacttctccgcaacttgagaagtctgtgtggctacataagcaaggggccagtgagtatttcatacggtactttcacacgaggaccataatcctcagctgacccttttttgccccaggattattcgccgatcccttcgttcctgcccctcctgtgccgccggctggtagattcaaatctacacctgaatatcagatcgaaatcctattctctctatctgaacctcctcttgccagtcaacaacgaatatggccatctggttagaacctacaacggcatattgtgtattcgggaagcctctatcagttgggactccagttggcgccggggactagaaacatagttgcgctcacaagagcaagagctatcgcaatcagcaatttatcaaggaaatatgaacctccgaaaagaagcggagacgcagccgcagtcgcccagcgccagcacgaggacatccactccaaaaagccaggcaagcgattcacaaagcacaccccgccgctccagtcgcaagaaatcctcagatgccccagataccaaagctaggagggtacgcacaggctgcctcacttgtcgccaaagacatttgaagtgcgacgaagccgtgggacgatgtctcaattgtcgcaaatcggatcgcatctgtcgacgtggtgtccgtctcaatttcattgatactcaaactgtggcgcctccacacatcatcgctcggccccacggatcgaaggtgacatttcgagatgactcgcgtttgatcgcgtctctgtatgtgggaggtttcgagatatacccacccgttcagccagagagtcctgttcaagagaaccaagattcgccacatgactttgactttataggggatgatgatttgacaaatctttttcaatcaatggcacattcgtttgacccgctgagctttgatatcccacacccaaatgcaacggactttgttggaagtgatacttggcaccagtctcacttggtaccaggagatgaacttcttccgcacgggacgtcaaattttgcgcgaaaactggctgggaaacatgaatattatccttttctcactgacccagagcaagtatctcttctcagaacattcatggaagaggtcggtccccgcctggatataatggatgaaatgaaccatgtgagtaaaattccccacattacattcttacaatctgctcacaaagcgcagttttcccagattcttccgggttttgccattagtgagcccatattgctcaaggcatttcttgcgtgtggtgcgagacatctttctattgtagacccttcttacggggatgaaaaagcgacacattattatgacgcagctactcgggatcttctgaatgcggtacatgatcccaaccgtgactctgtactatgcgcaacagcggcccttgccctcggcttctccgaaaccatgcaaagccaatcaagccacagtggaaatcacagcgcaggctcccgggctttgatcagagaatgtggctggaatgccaaaacccctgggctgggtggagcatgtttcaggatcagcgtcggcgcagaactcctgaactgtatgcgatataattggacattgtcttgggatccaaatacatggggaatcgatatggacatggatcatccacaagccgcaaatggaggcaatcaagatctatggcatcatcggatactttatattttcgcgagagtcatgaccttcaaagcatcttcgcgcccatctcacggtgtggcgcgggctatccagctcaacgatcatgaatggatcactcacaacaggtggtgtgaccaatgggcgaaatccattcctagatcccttgtacctcttggtcatttgcagccatggcaaacaagttccaaatcggtctttcctgaagtttggtatgtcctcaattctcgcattcaacctgttcatcaactaatattcgtaggcttgtcaaccgatctgccattgtttctcaattattctaccacgcgactcgtattatgctggccaaaacacacccttttcagtcagagttcgatgaggatatgcgaaagatgcaacgcagccatgcgcacgaaatttgtggcattattacctacaccacagatcggttagtacaaatcatgaccaaaattttagaaatatctgtctaaccagttgagcagaagtgtggcggatatatccctgtactttcttgtactcgctgcagagtgcttagaaacacgagaagcccaagaggaggtactcggcatctttgataccatcacgaaagtgacttgcagcagtgctgaaccaatcaaaaacgatctcaaacaaatttggagctgggccgaagctcacccacacatggtgacgccagcccagatgcacaaccacttctatgaattagacccatccctatcagtctccaatcacccggactcatctccaagtctacacaatcccttgttgactaggggtgacttctcattggagagccacccgtatcaaggatactatgtgccaccacatcaccaccatgcactcaatcagtatcactatgggtcatttgatctgatttgatgcttcaaacactttgacgaatcatgaattttattgtccaacttcacattcatactgcttatacccctgtgaatacaataacgctaggtttcgctaaaaaaaaagctccatggcagggctgttcccagctactttgggacattcactgtctattccagtattgcatgactaatatgaagcgttgtagacgattaaattagcatgtatctcagttgttgaatttagaaatggccaggaaggtggggtttaagaactgttaccatgtatagatatatatctgagatgtgatttattaacacaacaacttagcgactagagagaacgatgttggagaattatgacaccagctagctttgactgtggtcttgctgttgagcgcaatacttgccacaacagtcgctacctcgtggcttatgacttcatatttcatcttgctcggttcttaaataaacacccgatcataacgacgtatggttgccacaaactttgaattacgtactatatacgttgaacaattgcgcaaaaagtagcatggccaagctctggtctaaacgacaggttcgggactcttccgacaactggtatatttgaaggacgcctcatcctccttttcgtgaatattgcgttgaaaagtttgaaaattgcacacacacaacttactcagattacaatatgtcgaaccctgccgaaagaattgcagaagataattatgaaagagacaatgacccttcgcccgtgaccggaaccttcgcagatgactcttatgtcgaagagaccgatccaagcttgagagcacaagtccccgtccagggagatgaacagccatttgatgacccaatacaaccaccttattcaaattctgatcagcagcttggtaagtccatattgtatttcttggcaaatatccaagtatcagcgaactaatagcgtctatagagagagacgagaacgaagcaatcgataactctaatgtcctaaaaggagaccgtctccgtcatgcaaagcctagaacctcgaacaggtacaatgaggggccaggtgaacatgatctgccggctgagccttaagtgatttgcaattgttcttgatctatgaatttgtgcggatatcgaaacgcagtaatacaaaccagttgaatttcctcctgttaaagtatctaaaatctcgatgaaagtgtactctactatgctctgtaggtatgtagatatcaacaacattggaaatcgtccaagcgctaatcttcagggtgttggggttgataagacgtgctccagtcagaaagaagtggtgcgattgaagttatatggaggcttactacagcctggacctcgggagattgtgtatccctcaactatcgtataggaaccgagttaatctgatcggccccgggggaaagggcaaattaccgatgcgagggagtccgttcaagtttgccgaatcggtcgacgaaagttgcggtcataagtcgatatataactgcaattcacattattatcgagaaagaaaactggactaaaaacggaaaaaaaacaaagctccttggccagcctgttttctgcgtccctgtattctggaatataagaatataacccttttttctatcagtcatagccatccaacatagatatctaggtgttgtagcttatttgtaggtgaggctcaagtgtggcggtgtaggcaggcaattccacacacctctgccgaagatacaagagaatatatcaacaagcaacaaccacacggtatctgggatggacaccaaatcagttcaagctcaatctccagctaccccagtatacatacttcgtggacatgcttctccaattcatgccctgaacatctacagccagaatttacggcttgtatccggcgacgccaatggctggatcgtcgtttgggacctggtcaccaaacgccctgtgacggggtggaaggcccacgagggggctattttggaggcgagaggctttaatgttgacttaggtgcgactgagatttacacgtatgatgattcatccaccactacctagccctggaggtatcggctatcctactaacatctgcaatagacatggccgcgaccacaaactatgtgtgtggaagcttcgaccagaggatgaatctttccttgataaaacgcttccagtggatgtggctgagtccgcacagccagaaaataaaagccagccgtggttactccattccttgcccgtgaatgccctcaatttctgcgcattctcaatagcatttgtgaatgcggatggacttcctggagctccatccaaatctggaaaaccagagaatactctctttgcggtacccaatgccttagactcgggtggtgtcgatatttttcacctaccatctgaacgcaggatcagtactatcccatctgatcaatctatccaaactggaatgttgatggctgtaaatctcttcacgtcaccttctggggatctctacgtcgcctctgcatatgaagatggccatgtgatggtcttcgttcatcgtggagctctcaaatcggccagctttgagcgtgagtatattagcagcaaccctttgaaatgggacaagctttacgctggccaccctcattcccagccggttctttccatagatgtcgccccctcccatagatacttcatctcttcttctgcggattctctgatcgtcaagcatcccatccccagcatagggcctgcgggttatatccctactcctggctacaaagaagaatccccattgaagattgtcaacacaaagcattcgggtcagcagggtctgcagatcagatcggatggaaaggtatttgctactgctggctgggacggcaggatccgggtatactcggctaaaaccatgaaggagctggctgtgctgaagtggcacaaggatggttgttattctgtagcgtttggggacactgaaagcacgtcttcgttgatgtcttcatcgcctgagtctgcaagacaagaacctcgagatacagaccagggcgcagcaggacagacagtcatcgacgtacgcgactactctctcgcaacagtgcagcaacaacggaatcaaaaagtacaagaaactcattggctagcggctgggtccaaggacgggaagatttcattatgggatatctactgagataaatgctaatgctacaaaacaaccatgcgcccatgcttttttgagggagtccactgagcgaaaatcaagccaagttgaactcgttagctccagacatatgctccctcatcttggctctcatcttgcgagcagcctcgtccgtaacatttgttgaagatggatcgtcatcggcctttctcttattgcctgaaacaccgtttcgggctgccttgaagtcctttttggtgtcttcttgtccaggtcgcagaccggggacgttaattttacccggtcgatcgcgcagggcgaagctctttgcaagatgacctaagtgaagttccttaatgtcgaacatgcttcgctcagctgaggtgtgagtcgcgtaagctcgaacatgagattggaatgcccgtcgagccatttccagatattcagggttatcgagtgcccaacgctccacgtccatctgccaatcggtcgtcttctcctcccagttcttctttttgttgtcgttgccgccaaagccacgcttgagaatctcgtttgcatcagtgcgggtgagcgccttgcctccatcgcggtagccacgttttagtacttcaacatagttctcttcacagccaggctgaaggaagacgagggcacggccatctcgtccaacacgagcagtacgaccaatacgatgagtgtggtcatcagagctgaaggcagggtcgtattcgacaaccaagtccacgttgggcaaatccaaaccacgcgaagccacatcagtacagatcatgacacaagcctcagtactgcgagagaaagagccaagggtggcggttcgaacgttctggggaagtgagccgtgtagtcgatgcaagaggaccggattcgctggggtcgagaatgctctaccgagagcaatggtgccatggggtgacagtttttctttttcttcatctttttcatccttttcgtctttttcttctccgtcgctcttcctttgttgctcgcggtcttgattccttgagaatagctcaaaatggaaatcgactacgtcggcgcaagacatgaaaacaatcgccttcatcactgatccctttcgcatgaacgtcctcttcaagtaggctgttaatgaaaccagacgtagcttagctggaacaatcgcgtacgactgcttaagctgggcggggacacggaatgactcttcctcgtcctcatttggcttctcgtcgtcctcctcggacgggtcggctttgatgtgtaccgcatcctttaaactgatttctcctagtttttggacattcatctttagcgtagcagagcaaagaattgtcgtccggcgcgtgggcacaccgggaacgcggctcgggcgttgcctagcgtcaagtttcttgacaattccttgcagttcctcctcaaatcccatgtccatcaaacgatcaccctcgtcaagcacgagccaccgcacgttgctgacatccagcgcttccgtattgtcgagatgatctaccaatcgaccaggtgttgcgacaagaatgttcaatccttttctcagccgtgccttctctgatttttttttctctccaccaattaccgttccacaaacaagccagttcgcacaatgcaggatgttctccaacacgacggagatttgcttgcacagttcacgggtgggtgccaagataatagcgaataatccactgtctcggtggacttgggtatcgttatgttcgttcttcgcttttgagagatccataattcgctgcactagcggcagaagataagccagcgtctttccggaaccagtttcggcctggatgaaagcatcgctttcctccttcagcaattgtgtaattgagcttgtctggatagctgtcggcgccttaagttccagctttgtgagcagatgtgctgcgagattgggagacaggcccagattcgtgaaagtatccagtccgtcgatcagcggcgcattagtcggtttcgcgtcttctgcgtctctctcctccttgggtccttcgggattgcgcgcttcaggattgctactgaagagcgaggaaacaaaatggcggggatctcgtgggtgttgctgttgtcgtcgatcaccgccagagcgcggggcgctaggacgattgaacgagtctgagtcttccgtcctttgtcttttcacgggccgtgcaccgagttggatctggttcggattcttagatgctgcatttcgcgcagctgcatctccatctccgggttctttctcagatactcggtgggctgagcgcttctttgcggtgagtcggtctcgccatgttcctcccttgaacttagcctcaggcttgatgacactgtcgccaatgctaaagttcataagcattccatcgtccgccattttgaaatatggtgatcccctatgaaaatggggaggagttgtgaagatttttgttgaaccggcgatccaaaagctttcgagactttttttcggtgccaagacttccaggctctcaggcaaattttctccgccctaaggatttgccctactttgtttacgttgaactgcaaaaggtaaatggagatatatttgaatattttgatgtctatcttgcttttaagtaatgtatgtgagcggcttgcttccaaaccatgttatgctaaagtgttagatgttcattactgagtggtcgatatagtatcaagcacgaggatccaagatgatgttgtcgatcagtcgcacagggacctttccatcacccaatccacaagcttcgcctggcttagactcttccagcggtgccatcttgaatgcggtactcaaaaccgcacccttagccgggtcaacgacttccagctcgtcaagggtatcaggatcggcaagagaaatgtagtcgacctcgtaaagtgctctctcggatggcgaaagggacttttgtccggaaaagacggaatctgtcacattacgagcagctccaaggatatctgcccggctgttcttgccgcccagatatacttcttctgcggctttcagtgccttgtagatagtgagcccaacggttcgtctccggtcgcccaggtagacgtttcgtgagctcagcgccaggccatcaggttcacgcgtagttttaatgattcgcacttcggtaccaacatggaaatcctctaccatgcgcttgatgaccacagtctgctgcacatccttctggccaaagtagacacggtcgggggttgtgatgttgaaaagcttcatgcaaactgtcgccacacctcggaagaataccggacgagaagcgccctccagtttggtagccaacggagtaattgtgacaaacgaaccgtttccatcaacctccgacgacgggggaagaccagggtacataaccttcgaagtcggtgcgaaaatggcggtgatacgcccggcacttgcactgttttcgcccaaccgctcgagctcctcattcagcctttccaacttctcaacgtcagtatcccaggtgcggggatagctggacaaatcttccgtgactccgaattgtgtgggattgacgaagatgctgacgaaaatgtctgtgttctcgcgagcagcttgtcgaattaaggaaagatgaccctcatgaagtgcgcccatggtaggaacgaagcctacactccggttcttttgcaacaattggcgccggagtccccggatcgagggaacatcacgaaagacttgaaagctggatggtcggcgaacagattgcgaagccgcggtcgcgtcggcaaagagcgataaagccgtcactaggataaattgagcttatctggcgctagaatttccatgaaagagacatactcgaaaacgacctcgctccattgaccaagcgagacatcttgtgtgaggttaatgaacagaaaacgagcctgggatgagagctacgggcacatctcagtcaagcccacgtgacctgcctcggctgatctctggggaatccgagaaaacatccgggggcgatccgcgggctgattgccgcttgagagcttgggggttcaagctatgatttggtcccgcacttctcctctaagcttctcatttgactcctcctcttcttttctcccatggacctaactgctttctcgtgagctgacttgaagtataaccattctcgccctgcccccttctacaatgccgtctcctaagtcggctattgccgatgacaactcggcacccgatctagaaatcgtcaactcacagttgacaatacatccatccggcttcactggaggtccggaaacccaacatgaacaaatctccgaacgcaaccttgtcagcaacatggcgcgatttcgcgagaaccccttccactttctccgggaagtgagcctatacatgtccggcacgggatggcgtgcatatgacaaccctatcggtcaaccgatttactattctggcttttccgaaaagatgaagacctccatattgagcagcctactgctgcaaaacaagattactgaattggccaatcgtcgactcatggtcgaagagaaggaaggactgctagcaatcaatgaaggtgcaacgctggacgacaaacgggcccgtcgccggactgagattgaagataatcttcgagaagtcgtggacacaatgatggaaaacatgatttgcaagatggaaagcaaaagatttattcggggcgcttattatatgtgcacgcaacttttgactcgtgcttaccatcaaggtaaatattccctgctatactcattctatcgcaagtcaatgctaaacgatattcaccttaggcatccatgtatccagcgaagaagtcctacgtctaagatctgtagccgagactgctaccaagaagaagcagtccattgttttcctgccttgtcacaagtcccatgtggattacgtctcgctgcaactcatatgttaccgtctcggcatttctcttcctgtcatcgtcgcaggcgacaatctgaatatcccattgctgggccctttcttacaacacgcaggtccgttgcaagacaatttcctattagcttttagctagcactaacctgttttaggtgccatgtggattaggcgcagctttggaaatgatcccttgtataatactgtcgtacaagcttatattgataccctccttcaacaaggcttcaacttccaatgcttcattgaaggtggtcgctctagaactgggaaactgctttcgcctaagttcggaatcttgaatttcatcatggacagtatactatcaggtcgggttgaagatctcatcatctgtcccgtcagcactcaatacgacaaggtcattgagactgagtatgacaccccgctggtaccctaaacttttgatgagcattggcattaacccattctctaggtcatacattagcgagcttcttggtcaaccgaagccaaaggagaacttggctgatttcatttcttcgtcctcggttttgaccttgaagctaggccgagttgatgttcgtttccacgagccatggagtctccgagactttattggccagcaacttacgcgactagatcgccccagcaccgacatcaacaacaaacttagctatgctgatcgaggccgcattctaagaacattcggttatcgggttttgtccgatatcaacgacgtgtctgtgatgatgccaaccgcccttgtgggaactgtgctcttgaccttacgcggccgcggagtcggaaagggcgaattggtgcgccgactggactggctttgcgatcgggtgcgagctaaaggtggaagggtcgcacacttctatcgctcgccaacggagacggtagttgatcgtgcgctagaagtcctgggacccaaactcgttggtgtgatctcaggtttagtcgagccaacttactatgcggtagatcgtttccacctatccttttaccgaaacatgctcatccacctcttcatcactgaagcgctggtttctgtcgctatgtacacaaagatcaagcaagggggtgggcctgccaatcaaataatcacctacgaggatttgaagaaacaggtgttattcctgtcgcaggttttccgcggtgaattcatttttccacctgagggcttgactcacaacctcgataaaacgttgcgtgggctagagaaggatgatgtgatcaagatcactcgtaatgaatccagcacaccactttatgttgaattgagcgagtctgagcgactatgcggtcgcgagaactatgacttctactgcttcttgatctggcctttcatcgaggcctcttggcttggctcggtgtctcttcttggattgacgccgcctctcgatagtccgaaggaagtttggatcgattcgaagaaagcacaagatagtgctcaagtcgtgagttatatttcccatgctacaccgactattgtattaatattcacattcacagcttggtaaaacgttataccaccaaggtgatctctcctacttcgaggcagtcaacaaggagaccctcaagaattcttatcaacgatttgaagaagagggtattatcttagttgcgaagaacagaggatcgcgtgtcggtccgtctcttaggctggctcctgaatgggcaccccagcgcgacgaagctactggaaaagttctagctggcggtcgactgtgggactttgttgaattgattgcacattcccgtcgcgaggggtgagttcattttattcagactatctctgccaatatacgactaacatttcacagcaaaaaccgtcgtgacggtgcaactgtttcttcccgcgttcttatcatgtctgatctcgttggacggaagctgttccaaaacgccgcggcatcggtgcctgccgatgtgtcgtcgcggcaaatgcgccggaatgcaattggagctgaggcaaagctctagtcattcccttttgatacccatgtacacacattgtacaggctgcttctacatctagctcttcctgcgtgtcataatctcaatgcacatattttagtaaaacatctccctgtctataactaagcattaattatcagctaatggatgccacctatagaatcaaataggtcatacatcgcttcaaaaaagaggagtaggcttgattcacctgtcagatttaagagtggggatatttggctacgaaggtcttcaatctctttttatagtggtccatataaaagtccagaatttagaggcataagtcgaagtgatagatcaacgattccaatatgacatacaatgtacaatatatatggagtgatgtaggtatgaagtcgtatctctaactcgctaacattgttgctgttcacatacaatcttcaataaataatcaaatataaaaacaacataagacgaatcaaatccaaatccgctgaactgttccccgtaagatcccaaaacagaaaagatgaaaacagaagaaaaaacaaaagaaaaaacaaaagaaaaaaaggctcgaccgctatagaaacaatatattgaagtcaccgaccaaatcaaaccgtcacaaactgacccttcacacccggactcgtgggagccgatcgaacagtcataaccttcggagaggaaacatcgattgacaacttctcaatagccttggtggccaggggcgacctaggaggtgtcgtgaccagagaatcggtagaccttttcgcaaactcctgaagccgacccataatgaccggggaatcagagtacagtacaataccctgcgagtaagtacatgcggtagctttctcttcatcgctagcgaagtcctcgtgagcagcctcgcgcgtaatacgcgggaaggtgcgcagtacgacatggcgagtgggctcgctcgacggggtgtgtttctgatctttgctggtagcgtactccagccagccctcgttcgagacactttctgcgtccggggcggggaaattggcaacgacgagctcgcgctcgacccgtgcgtgtctccatgtctcggcggcgagtttgacgatctttcggacgcccattaggagggagtcgaggtgcttgggatcggcaaagtgcttgatgtggtcgatgatttcgtcgacgatgactgctgctgctacgttgattgattgtttggcgtctgaggtggtgtaggctgctttcagggtctgctggcgccagaatgcctcacggcggacggacttgcgccggatgtccatagatagcatctggaagaaggtgtcggccttgtcatatcgccggcctaaggtgaagaggaagggttggaagactcggaaggttagggtttttgagatgatatgctggatgtaagcacatcgtagttcgcgggaggctggagtattgtcgaggaaaggtggaagttcggatggaattttggaaaggatgtccttggggggatcaatggggagatatccgaaatgctccttggatagattgtggatgagctgcgagagctctgtgaagcagtcaagactagaaagagagagtttattagatcatgtccatttatcgtaatcgttatcgtaatcgttatcgttatcaacatgaatcttttaagataatatatgcccgccgtgcgccgatgccaaacaaaggaaaggtagagaatgaatgacttgtctttgaagacaaagacgaaaaccgaaaacaaaagaagaacaaaaaaaaggacccgaaaaattaaaatccacagggcttcaaagactgacttacaagaattgatcgcccttcgtattcttgaggtcagtggcctctcccaggctggacagtgtctttctcagcctttcgcaatccgcgcccaagttatcgatggtcgttcgcatcccatccactgcacgctggaggtgctgctccttgacaataccgtctccttccaatttttctttctctcgctcggcactggaaagctcgctatctctctcagatatttgctgctccaaggcagcgcgctctgtggtccagagctgctctttctcattgaagtgagcttccaggtctgcgatcttatcatccaattctttggcagcagcagcgagttgttcgtcgtgggattgtcgcagggagtccaattcaccagcatggctttgtcgcagggagtctaattcatcagcatgggattttcgaagttcttccgattcttgtgcgttcttctggtgggtttcctccagctctgcgagcttggctgccagttcctcacgtgtcgatgagagttcggtaagtcgggcttgcagctcggtctccttggattccaaagcagcgatctgcgacgccacttctgtcttagtagcctccagctcggtgcgctgggtttcgaaggattcctgcaattgggctttttctttctcccattcggcttgactagcttcgtgttcactgcgaagctcgcactcacgactctctagagcctcagctgccgttttctcatcctccgccttgatctcctcaaacaattcagtgagctcctccttctgtgccacaagagctttctcctgttcctccttctgagtctccaacgctttttcgtgggcttcggttaactcctggatgctttcatttagctggttgatttgtccctcgagttcgaccctagtttcagaaagctcctcgttggacttctgctggacagctatgccatcttcaaggtccttctgcttctcctgcagatctcccagttggagacgcaactcactgatggtgtgcctcaacttggtatcttcttcagcactttcattggctgtcttcatcatttgagcttgcagagcttcgatatagtagtctttgtgcattagagcttgctcgtgcaggttttcaatatgcttcatctcagcctctcggctcgagagcttgctgtgggtgttacgatacccattaaggaggctgttgatatctggaagcgccgactggatgcgttgaagaagctcaatgtgatcaccgtcgttgtctgggggagatccattctcatggggttggccattgcccatggacaggttttgaagggcctgatatgatgctgcatatgatggatctgggatgctgtagctcctataatggccttccgattggtgctgaggagaataatgcccataaggaggcatcgttccggcagggctcatgacaggagattgaagagcatacgttccattccgggtggaaggcggttcatggggaggcattggcgcggctggtggattatgaggtggaggagttgcagttggtgatatagttggggacatttgagggtagtgggatcgtgcaagcgggctactgactttgggcaccggtgaggcaatgtgagctactgatgaggcgtaaggtgccggggaacctgcgtagggtccgggtaagctgtaaggtactggagagccagcgtaaggtgtggatgaggtgtaaggcacttgggaaccagcgtacggcactggagcgtaaagcgccggtgaggcgtagggtaccggagaagtataggcgtttggcgagacgtacggcaccggggaggctgcgtacggcactggcgaagcgtaggggtttggtgaggcgtatgggtttggcgacgcgtaggggtttggcgacacgtaaggtggtggcgcagagtaggggacaggtgaagcgtaaggggaatacgccgatggtccgggataataatgttggttatcctgggaaggacttgacatataccgtgcttcagtcaaggatggggaaggcaaaggcacacaggcggccacaggggagaatgggtccgccggtagtgatgagactacagtcgtctcttcagggcgctcagcttgattgggctcgtcttgcttgttatggtcgttcaagggctcctttgcttcaagatccgggataggctgaaccacacttgcttcttccacaggcggctcctcggattcagtgccctcgatgggaggctggaccgagcttgcttccacggccggctctttggtttcagtttcttcgatggggggctgagttgagcttggctcgtccaagggtggtacttcgttgacaggctcgtcgactacaggtgatgattgatccacgacagggtcagggatgtcttggggtgaagccttgtcgtctaacgcctcggatgccgatacgggggtttcgtgtacaggtgatactgaatccacgacagggtcggagacgacttggggtggagtgccgtcgtcaagtacctcgtatgctaatacggggttgtcgagtacaggtgattcttgatctgcgacagggttggagctgttttgaggtggattgtcgtcgtcgagcacttcgtatgctaatacggggttgtcgagtacagatgggacagggttggaactgtcttggggtgtactctcgtcgtcgagtacctcgtacgctgatacaggaagtggcgtcgttacttcaacgtctgtattgccagcagtagactcttctgttacttgctctggttcctgcgccttgagttcagggctgccaggagcaggagtagtggtagttgtctgagtctctgtgacctctgggctcttccccttcttaaccttcttgggggctgccttgccatttttgtctttggccttgttcttcttgcccgcggccattgcggtagagtgatgcgtgcccaagacttcttgcttctgacagacgtgttaccaataggatcaatgtgctaaatggagcatgagtgatagttccgatcatatgggatgaatgcactgtacatttgcaacaagccctgtggcgatagctcaagatatagcccaaaaatcgactatagttaagaggtattagaactttgggatacctaaaagcgtaagccaagtgacttcggtggatcgggcagagacctaaactctttggctatgaccgcgaatgaagacccacgaaagcgtagatattctcggggtgtaagaccaaaagaccgtagggaaggaaaaaaaggaaagaaaaagaccaacccgatcgaattttgcaaaaatctctcgaaatttgcatcccaacgttgtctgagcacaacagcggaccgacccttagcgtattgatacccatccaacctcccaatgtgcgagagggccatcaattagacgccagtgccgggaattattgggggcaaaaacaagatccgaatccactcgtattccattctgaactcaagcgagaccagttgggagatgccatggcattgggcatcaaactgtggatttgggcgatcgagataggtggggaattcgacaccgacaggctgacatgtccgatcgagacccgaagacatgggaattgaaatgaggcgatatagcaaaaggacgcgtctcgcccaagtgtggtcaactggcaatagtgaggctgccatcggacaacacatattactagatgaggcttcgaacatacggccatattggacatgcagattgtctactccgtactttgtatgccaagtagatcgggcttcagttttattttggtgttttgtatctgtacatagtactacacagagtgcattgcattgcatatagtactgatgtatctattgatcatgggagtcttgcaatgcgatactgaatgcatacgacgtatacggagtacactgagttggttcaccttccactcaacacctggacatgagagaatgaaaatatcagatcgattccagttgaaacatgagtccatataacaatttaatagccagcctaaatacacctaactataactaataagctaactaataaacgaagatcttagaccacatacatagttagggagcgaccctaaacccaatacggacatcacgtgtcatcgactttcactttccgcctcgccctatcatcactccccaaagggtcatcgattcataatcaattgcttccctccacacaatgttcgctgccagacgatctgctccttcgacgcggcagctgctgcgcactcagcgccgctggggctctcacgccgcccatgagcccgtgaacgaaggtctcggcgtaagctcttctcccccgcccaccgcgaccagacccgagtttggaagcagagcaagatatgcctcgatcgcccacgagtaattggctaacccttacgtgtacacctaacagcgcagcttctacgtcacatctggcaccatcgcttccgccttcgtcctctaccacatttccaagtccatcaaggaatccggcgaggcatcttggatgaccggcctcattaacaagtggacgccttcccaggaggtcttcgagcagcgcaatgctattcacaccgctatcatggataaggctgcttttgatcgccacttgcttggcagtcaaggcccagccgaggcttttgcccacagacagcccgagtatgtcatcgtgttgctccggaaatgcttttcattgttgtcttgctgactgttttttctttttccccaggatgttgaacgctggctctccgttcaacgtttcgcccggttcgcaggccgacctgagccatgtcgtggctcactaccagcgcaagaaccaggagatcgaggagtctcgggtcgcgcggacgaaggacggcaaggtcgtgtcgctctacgattaaatgggggtatcttttctctttagtcgactgtctaagtagacatgtgtggaggaaaaatcatgtacatatacgttgggacttgacgttcaatccagcacctgataattggattttcttttgtttttgacctaacgcccagatccttgctgaatattggttgaatgctggttttggatattcattttattaccgaattcgctaaggcccgcttgacggtacaacctccaaaactactctgcccacaccctcagattggacgtccaatttatgctgcacatccagctcattagcagagacagtacccagcacggcaaggaactcatcaacgccaccaccaactccgaaataaaccttcttcgccgcgacgagagcccgacttttcaccgatgcagtgttcgagcggcgcagcagcgccaaaagcgtctcggaaaacgcagccagcgatgcgggtgagtaaatggtctcactagcaagaactagagtcttgcgagcaccatcaccggacgagaagaccaaatccacaaacccgggcgaccaagcgcctgaaatgaaatcaaccgagatcccacgctgagtaagatcatctttgaattcttgaaccagctcaggcgtgatatccagctcctcgtcttgccctcgtgcagttaacacggctgagacagcggtttgagggcggctattgtgccacgtcaaaaggagattcgggagcgtgacaagacggagcacgtcagagttgtagtctgcaaaagtaaagagtgtctttatttgactctggccgggctgggcttggctgagaagacgggcgaacagtgtcaatgatggaactgctgtgcctgcgccgagctgttcattcatgttagctttcttctgccaggtggaatttgggagaaagcttccaaatggcggatgatttacgcacctcaataatatggatgtccgccgagctatcggaggattcgttaagaatgtcctcattgagggagagcttggctagatccaaggcacattcccaggttttgaagccgccttcatagaaattgggcgtgatatcgcctttttcaataccggcaataagctcttcattatcgtggcctgcgctgtcttcggccatgagctgggtgcgaatgtcaaagatctctcgacgagcgacgaccagaggcgtatcgctaattgagagcttattgtagaagatttgagaggggagaattgaaagctgccatcttgattagattttgactctggtggaaaggtatgatgcatttcaaagtaatgaattcatgctttcatgctctcgtcgatgatactcttcggcccgaattgggatttagaatgtactcgccaactcaaacaatataatacgcataattgagaatgaaatatcttgcttgatcacttacccattcattcatatcatgcctactcgctttcacgagctcaggaagagaattgcccacggcttgctgggaaggcatatccgagaaatcttgattgatctctgaatcgtcaatgtcgatatcatcccccgagaatccgaaactgaaggccatcttcacgtgaataagacggctgtctctccttccaagacacctagtattgtgtaggtgggttgtctgaagtggcccagatgttgaattcgtcgaaattgtaggttgtggacaaacttgcaccagttttggcaagaactgtatattcaaaggtaaggacgaaccgattaaatagtagtttagttccgaggctttcttttcacagatgctgtgatctgatttcaatactccgtacaaaaaattgcatggtggaatgatgactaagcggatatctggcacggggccttacctaggcaaagaattattatttatacaaaccttggagacaacggattcgaatgctattttgaaactgttagagtcgggctgtaataactataatatgattttgtaatgatctaactcataatgccatatccaagtgattagaaactgatgctgtctattccaatattaaatgcaagccgaagacgtgaactttaaattataggctgcgtttaagccttctgagccactgcagccaagctgagagcctgcaacacatcagcgtgcagatccactgcatcctcaataccacagctcatacgcacaaggtcatcgaagacaccggccgcctcgcgctgttccttgggaatgcctgcatgggtcatgctggaaggcacctcgcacagactctcaacaccacccagactctccgcaagggtgaagatcttagtgaacttgcagaaatcgtgtgcagcctgctggcctcccttgatacggaagctgagcataccaccgcccataccgtcacggtgctgcttgagggcaatagcgcggtgggggtgggagtcaatacccgggtagttgacggagatgacgtggggagaggattcaagggccttggcgatgacagtggcattctttgacgcctcgcgggcgcgcagatgcagggtctttagaccgcggtgagcgagccagcagtcgaatgcggacgggacggcgccaatcgcattctgcaggaagccgaggcgctctttaagggtctcggaattaaaagcagccacgcccataaggacatcctaggttcaagttagctgaattgatactggcaatgcgtaaattggaagtaagaactcacggagtggccattaatgtacttagttacggagtgaacaacaatatcggcaccgtggtccaatggattctggacgtaggggctcatgaaagtgttatcgacaacaacctgaatgccatgctggtgggcgatgttggcaacagcccggatatccaccaagccaagggtcgggttggagggggtctcgatccaaacgagcttggtctcggggcggatcaacttctccacatccgactcaatggagggggtgaaggtgacctggacaccgtgcgccgaagcaaccttggtgaagtatcggtgggtaccgccgtaaacatcagagaccgaaatgacatgcgagccagcagcaagagattggaggatattggccgtagcagcagagccggaggagaatgccagagcatacttagcatgctcaagagccgcgatggcttgctcgaaattatcactgtggggggtattagtccgcctgatcgatgtgtcaaaccgttggactaatagactgaccggttggggttggagctccgcgtgtactcgtacagaccaacggggtttccgacactggtctgagcatatgtggtcgacagagagatctagtcaaggtatcgttaatgccgtctttctttctcttctccctagattgatgagcttaccggagcaatgacagcgccggtcactgggtcatgaggcgagccggcgtggacagccagtgtcccaaagccacgctcagaagtgtgtccgttttcaatggagcccattgtgtatagagaagatgatttcaaggcaattgaaagaggcgaggggtaggttatatgtttatcgataagatgagatcacccgctttctttgtatgacttgtctgaaaccggaatgagacacggattgcgaatctgattgataatcaggagcgatggcgaataacagattcaatgactgcttttggatgttttcgtgctgaaaaattcaaccgagggagaaaaaaattcatcagaatccttttacatactaccaaccttggggggcagatgacgatggatcgcgcgatttcgactggacgagacaccgacggagctccaccggctgccggcaattctgctcggagaaccgtttggatacgccgatgagtcggacagtcggagagttcggcacttgccgcattgatctcctaattggtgtgtacgatactatagttatgcagtatattttatatgcatgtccgttattttcggaggtatatagttacacttgcccaggtgtattccatgtcaaatagctttacactgtcatctcggctcattacacatggtctatcaggtatctttatattcattggcattgattcgtatgggtatctatctgatctgactctaaaacaaattttatgggcgctgagaacgggtcgcgataggcgaacaataagacaatctaatgagacatcaaatagtggtttgctggcagcagcagcctaccaccaagtgatgggtcccgttccacccatttgcatcgagccctagaagatgattagtgagagctagaaaatcaacatggagagaccaacaagaatggagtacggagggcgcctctcctgtggggtttcatctgcaacatctggggcattggggatttggtcgtgccactcttctgattcgactcggaatcgtacaacttctcctacatcgaagaagaattccgttccaccttcactctcccagatccatacctgctcggcatagtcgctgcaagacacattagcatttgagatttgacatgaggtgagaaacagctcacaatcgggacttctccataagcatttgtggcgggatcagaatatcattgaagaattcgatgccaactggacttcgttagtttcgacgagcattgagtttttatactggaaacacactcttgattccatgttctgtgccgctagcgatctttccaagcatgatctcccctttgaagggtcggaaaacaatcatgcggaatttaactatgatagtcagtaaagagctcatacttgagaaaggggtgacatctaccgttgacattaaccaaccccgttccgtggccaatcaggccatcggaagactcaagtaggtcatagaagctgatgcagaggccaattttttgaatgacctagagcgcgggataaggttcgagaaactgaaaggaagaagcttgaattgcgtactttattggcatattttgcattgatgttgtcttcaagtgcaactgcactgaacttggagaaatcctcaggtgaaatctgaatcaagtccgatatggtggtctgccggcgttagaaaaaagtcttatatatgggcgtcaaacttactaggataaacatggtggcggcgaggaaggtgtagccagaagatcggtctgactaggcgaggacgaagtgaaaaggcttaaatatcttttcccgttttaccattgtcacgaagcaatcaacgatcaaaaacccttctgagattattgctccgcctataatcccgcccacacgtgaccccgggacggaagctttcaatttcaacctcgactccgctaataaactaaacttaagagattattcttgtgttggtgctggagtctccagcaaaccaaggctctcgtcatgagctcgcagggattctctttccctcccccgccgcctccgccgccagcgaccaaccaactgccggctcaccacccgacccaacatggacagagttggggtggacgcggtggacatggcggaggtcagaggggacgtggcagaggacagggaaaccgaggtcgaggaggaaatcatgcagaaagtggacgagcgccgtcatatcctcccccgacaggtttcaactacgcgcaaccaatgtacggcggatatccccaacctcttcctacagcaccttatatgcctccccaaccctaccatcatggacaaacgccggcctttcaacatcctcaaaatccacctccatttccatctcaacaatatccccagtcggtagctccggggaattatcaacactacaacacgcccaaccttcctacaccttaccctcccacaactccgacatacatgcaaggtttacaacctccgcatggccatcaaccaaacaaccaagcaatgatgcctcccatatcatggcgcaatgagatgcaaggtgcggtgccatacatgggggctcaaccggggcaagcacgagggccacgacctccccatgcgtatggcaatcagggtccgaaacccaagaataccccaaagcgggatcactcatctgcattcaacaaacctcaatcaactgcgcctcgaacccccgcagcgcctgccgtcccaagcttcggcaaccctctaccctcgaagccaccacccgctgcagactcgaccgccaacagaaaggcgaagaagagaaaaaggaagcacaatcaacttggactgacccctaataccgaggaccacgagtcaagcgaagaagaggttgacgaagacgaagaatcgaagctggcgcaaagtggatctggcgcagcaccacttcaggtctcatacaaagggaaaacggcaacattacaaacaccgtccgatattgccgcttggattgcagaacggaagaagaagtttcccacgcaagctcgggtggaagaaaagaaaaagtcaatggaggaggcaaaggcagcccgcgagttgactcgccaacaaaagcaaaaggagcaacaggacaagcgaaaagagcatacacaaaaacaaaatgaacacaagacagatcccgctgcagatgcaacgacaaacgcccagcgcagagagaagattcggcgcaaccttgaacgagaggagaaacgaatccaaaaggccatggccgagaccgaagctgctcgcctccgaatggaagctttacagaaggaggcattgagcctaaatgaagactttaaccaagacgaagatacgggtagcacgatcgagcaaccggccccggttatcaaagctgaacccgcaaccgcggtgccagagccagctatgaaaaccgaatccgaaaacgcggtaacggagccagccactaagactgaactagagaccgcggttccggaggcgaccatgaaaatcgagccccatggcccaattccagagcccgcgcaatcaaccgtggaaagcggggatgcgacagatgcgcaaggcgttcctgggcttttgttcgagtcccatcatctcgagcacacaatcaagaccgagcaccccaccgaccatgacttggatgccatggagctcgcatccgatcacggggccagtgattggacctcctcgggtgcttctggctcagatacagactctgaccctgacagcgatgactctgcgccagagcaagtaacttcacgtcgcacgggaccagagcgagtgccaccgccaccccgccaaggcaaaaagaccgtctgccgctattttgcacgtaatggccactgtaaccgtggcgaccagtgtaaattcctccatgagaatgactctgaacgaccctccaaggccagggcaaagcctacggagaagaaggagaaagagacgaaacgcaagggactttatcaagctgtgagagccttatttattgattttgctcgtattgaagctgtactgactgggattagttgctggaccgacagcagcaagacgatgaccgccgggcaatggaagtgatattctggctcggtcagaacaatatgctggatgccccacacgataccccaatgaattagcgttagaactggaactacgaaacattgaagcgcaaggatgaagtgaaaaaggtcatagctcggaggcgtagggggctttggtcggatttctaacttggatgaatacccgaaccctcagtcgcgtggctccgatagtacagagtcagcgacagggaattgaaagcgaaaaaacatgccaaaaacataccaaaaattacgttgaatcacatctgatccccattattctgcctagccaattatcgacgtatccaatgatgtgatctaaatttatccccccaagagagggttgtctcgtcgaagtgactgtagccgaccaaagtggatatcgtcatttaaggtcacgtcgagttcagaccagtcaacgccggagatgccctgccaagcgaggaaagatggccgtcagtggtccgaaaactcgtggatcaccgccacgctctcttttttatcggttttccctcttttgccctggatttgtctcctattagggcctcgcgggccctctttgggatggacggcggccaatcactcgccttgcttcctttgtatttgtttttcctcgtccctttgactctgccggctgtgcctagctccttatccatggggcacatgccctcttagttataaagctaagaccaaatatccccgacggtcttttcttctatatttgcctcttcacacgccttccactcctttgaggctcttgtgatttcactcgtttatccgcatctcccacttgaacattcgtttttcccaacctatatacatataccagtcataatgcgcttcttcatctctctcgctgtcgccgccatggccgccgtcgccgcggcgaacagcaaggctaaccccttcagcattcccgtcgagggttacaccttcaaggtcggcgagcctaccgctctgaagtgggagcctaccaccgacggcactgtcagtttgatcttgcagtggggagccgtgatcagcggtaactccggcactgtcattgcctgtaagcaacctggggatccatccgaatgactaatattccccgataaggcaccgagtctgactatcaccagcgaatatcgataacgacggcagctacacatgggatgtgccctccaagctggccgcccagccagactacaccattaagatcgtctcggacgatgatagcgacgactacaactacatcggccgtttcaccgtcgagggctccaccgtcgaggtcacctctacctcttccactgccagctcgaccaccgcgtccacttccactcagtcatccaccgagtcatctacctcgaccacccacaccactacctcggagaagtcgacctcgacttcttcggccaccaccagctcccccactactttgaccaccgcttccagcactgccaccagcactgctaccagcacctctgcctcctccaccgagtcctcggcgaagtccacctcggccagcgccagcgccagcggtagcgccagctcctcgggcgctgctagctccacgcccgcatcccagagcgccgtgcccaccaccaacgccggcatcgccaaccgtgtctccggtggcatgcttgccctcgttgccgctgctctgatgctgtagattgccatgcatgcagatattgtcaggaagaccttgttgcaaagtcacgttgacatgctttattgatgtatatttttttttttttttcttcacttctccgattggctgtttcctaaaacagccaatcaatttgtgttattgcctgtcccttttctgaggtgcagctgtacaaaacatcctcttctctgactacggtcgggattgtggctttgttattatttggtatactatttgtgtctccgtcagcggtaatgactgtatactccctacaatctactttataattgtgtattccctttatctgaatgatatattcgagtcatccgagtcatccgaatgaatctgtcagaaagacagtgggggaagtaattaatttggatagtcccgcgtccacttttttaattgtagtctaatctcgctggtagaaggaccttggatacagttgaatcacatataatagatctctagctgtggggagtatatatgtactccgcgaacattacctattcagattcaaacaggctatcctcccagtaaggggcctctctcaccgaagtacagagtagtactcctcacgaaggacataaataatgatcgtccatcggtggagacggtggccttgaaaaaaccaagcaaatttccctactaagtagggattttctcgtctccacagggttggagttgcggttctacatcattgttgtaccttgcaaagtctgataagcactttgggttattctccttctggtttttgactagctccgactagcaacaactcttctattttcctgtggcgatttgaaccttgttgtatcatcaagcctcgagtcgatctccgcggattgtgggcgagtgtatcgcaatacttgcaaggttcacgaagtacatgacatggacaccctatgtaccttcataggcacataaaactatatagtactcagaaatactcatcgcttacgacattgtcttgaccaagtccttggcttgtcccacttgaccatgtgcctgactcgtgaccacacaggcaccagcctccaggtaccaggctctctgcgatgaaatgtcaatctgctgagcgactcgacgtttcagttctccgtgaacgatgtcattgccagatggactaccacaccatgtgtttccaatatttccagggtctacttactccctaacagttcttgctatgctaggcaccagcgctatggaaaaagcaaccctggcataaaaaaccccattcaatgcatggctcttgacacaccgcataagcaatatgggagccccaagcaaatgaaccacgtcgctcattcttataatagcaccctggcatcgtcatcaaaagctcggctccaagcaagggtcttcacaaatctatcgcaggaacagtccactccacctcgtgtctgcagaggaagcaaggctcctaacactatgaagggcttttgctggaaatcttgaaacatccagtccatccggtcaatcaatagggcggattatggatctgggctctgatctatcaattgatccatgcccttcgccaaagaaaaatgtgattgcctatatgcaatggatgcagaagacatgcagaaaccggggtcctcgctatccaccttcttttgaaacatgaatggcccagcttgttcttttgtgtcacgttgctacaagatgacatcggttattggttggttgctgcgaacgatgacatgacagctgggtttgcaatgatcgaaccccctaacttgcagcagagcccattcagggctggaggatgatgaagatatttattttcgctagaatccgggctatgctgcataatttgcttattataaaggtgctgttgcatcctccctacaatatagggattggaaggtttttgcttgctcagtagtgccattcaaagatcaggtcagagcagagcagcatttgtcagatatatccaatgataagagggtccactatgctatctaaattctttcttgcatcggctgcgaccgtcgcggcgttcgctggcctagccaatgcccagacaaacatcaccgagaaagactgcgcctcctcatccgagtactcaaagtgcaacagggatgtcgcggacaagtggagctcctgtctccgaggctgtaacggcaatggtaactgtgtcgtggactgtggctgcgactctcaccagaagtatatcaactgcatggcggagtcgtgctggaaccaggtatgactttatatacaatttggtccaaaggaacacccggcaacgtctatcataaatccatgctaacaatatcttaatcctcaggtctactcttgcaaataccaactcttcgtgcagcagtacttcgccatctgccccagcgccaaagagccaatccccttctggccaccgccagacaacgcgccaaaccgctgctcatgcgatctaggcaaagtcactcaaacgacgctctcatcgcgcaaccagcaaatcaaatgcatgcgcaacgtcaccgacaacatcagcgcggacatcggcagtatcccagacctctcgaaactcaacaacggtctcgacattgccaaccgcgcctcagactgcgcctgctgcggagctagcgctagtatctccgcgtaagtgaagcacaccaaacccgcgactcttccaaagcacgaactaacccccgaaccccagatcctgggatatctgcccgcacaccgaacctactctcgccggcgcagacatgtggggagtatttttcccctccgatctacccaatctatacacctccctgccgaattgggcgtggtcgtcttgcgactcgacgctcaaggatacgacgtgcaaggacctgggtttcacagatacggataagttctacaagcccggcgatttcccaagtaatggcacctcgaccctgtacgaggttgggggtacggttacggcgcctcctagcggtactgttctcacttggtctcaggtgtcgactacttatactgttaccgcgactgggtatgacctcaaggctgtttctagccaaagtgagtaccgtgctacggctaccgggaccgatcaggcgtttgcgacgcagactgctgatagtggtgctggggctgtgaggaatggtggtgttggcgctgttgtggctggtgtttttgcggttgttatgttgtagcttggtggttaataaaaggtatgcatggactgtgctggtaggtggagggttggagaagttgatgtttttgtggtaattcatgatgtgatatgaccggtttatggaaatggtatgtggcgttcgcagcttatgtgttgcatggctactttgcaatagctgtcatgttggttatgccggtggatggggagggaggactggatactactcaaatacgaacatccaatgcacaagttcctttctcatatcgcagccctagtgttgctgatatcttcggaaatggtcgaattacggtggtgccgggtggtgatgaatggctaggatattttgcgaatgcgattaatctgaaatggaaaaaaacaatgcttctcaattgtagcctgcagagcagctatgaaatgatatgaaaatgccccgaaaccgcccagaacaacgccagttactccgtagatatcggtatcaaaagttggaactatctcccgctagaaaaagcacaggcaccgtagtcagtgtcccttaggacgaaaaagcaaaacaatctacgcatttggtgcaagagacgagaccatcacgcaacccacgatgggagaacccgcttcaggaacttcatgaacttccagaacccaaccgcgtactcctggttaccctgcgggtcgacaacccgctcggggaacgcaataccggcaccaaacagcccggggatgtcagatgaacgaccaggctcgtggaacgtgcctttatcatgatcaaagctcatgaaaaggggcgcaccattcttcgagagagccgggagtgaggtacgggtatacccgacggcctggacgagatagtcacacgcgggcaagtacttatggtactgagcagactcgatctcctgaccaccagcgcagtcgatcttggccagaacctggcctgcgtgcgaagtgggaagcttatcgtcttccagctcggagcgagcaaagtccgcagccaggcccttgagaccggtgttgtcgcgcagtatccagccgtccttgtactctgcgtagcggagggggtgacgggtgaaccaactaatacgcaggagagggtgggaggtttgggcgagcttggtgaggttcaggatggcgaggatggcgctgtgggatgcgccgacgatggcgacggaggtgggtctgtctgaggggagggcttttgctagctcggtgggcttgagcactaggtcgaggtccaagcgctggatgtccagtccctggactgggatgggggctgttgtggggaaggagcctgtgcagaggatcaggcgggtagtctcgatagtctcaagatcttccgatgaattctgtttgatgcaaatggtccagttggaggtctggattgtgatgttattattagccttcatgatagacaaggagatgtgcaataaccactaaccgtttcgttcaggttggctgatttgacaaagccgtggcatgcatatacttgctccatcttcaatagaccgtccgtcaggccacgaaccatatccgctgcaaaaccaagggggcaggtagcttcttggtcaagcttggccaatttggtgaacgcattaggtgatttggtattatcgataattttctggaaaggctgtgtggctgttgcgaacgtttggaataatgcaaccttggtgttactgaagggtaccttgttagtatcttccggtctgcgttcatgtcgagaagtgtacaaacctaggaacttcgcgatacttgctatggactcgcccggcctcgaaagaaggatcgacccatgtgattgagcccagctggcgctccaacaagtttcccatgacagcgactccagccggaccggctcctacgacgaccgctgcgcatttccgagtagccatgttgggtggtgatttagaagataggcgtaagagtgggaaagcgaataaaggactgaagcgattcaaaggtgtggaatgaaaaaagagttgtaaaaataacggtgatttgagctactaaataaacagaaccgtagtagctatcgcgacgggggtgcgcgacgtttaaaaagggggaacagtcggctaagacccagactccagaggacgcatcatcggcgacaggacgcgtggtattcacacagataacgcaacataacgcaaccagcgtccagtcaggacatcgctatagagcgggcacattcattattcccccaatatcccatgacacatgtgtagctctcggacgagatgggtcgccgttctatcgacatgtgttgaccaatccatcctgttccgcaggtggggatctttgacctaaaattggcttcacagttggcggttatctcccgagactttcagacggcgactcattcggcgactcgttcgggagggtttgagtcggcgactgggccccactgtgcgcttgccgtcggcctgtcggcagggtcgtgctcagttagtataggaagaggtgctcatgggataaacaccattttcagggcagatcagcggttggactgcatgacgactagcagcagggagaaataaaaaaaaagtcaagcagctaaggaggccgtcggctttatattgtgctgttttggcgtcgattaggcagccttggcaaaatggcgtgatcagttttgggcttcaaagccaatcatcggttagtcagtttgttgtatacaacttagttggttagttacgatgtatgttgtatgttgtactccatacggagtacaatcctagttgtcagctaagacgtggtaactgactagttatgatattcttctgaaagggcatttaatactccacaaaacgaaaacatgatatcagagaacatccatatatacatcccctcatacagcccagtaaatcctcacgctcgcttgatgaacgtggtttgaccagccgggaaaccttgcccgggcccaaagggcaatcgaatcgccaatctctaactcacgcacttcatgtccatcaagagtaagccggccacgacccagagtcttctcaatctcaagtgcctcgggcgagtctgcctggatatcatctcgatagtcccaaacaattatattgtgctgcatctcgctcacgtgggcaccattggattgcaatttgttgtggcgcggcaacagcagcgcatcttcctcggtatagtgttttcggacttgtccacgctcattgtcgaggatctcttgctcaattccattggcatacatgttcttcgtatgcgctccgtgaataacttcgatgtcaaaccaggtccatgaaaattcatacatgttgtcacggcatttcccactgccttggtcatgagatgagatattgaagactatcttgcggcaagggtgtgcaccgcgatgaggtaacggggtaggactcgagtcttgctccaagctctagaaagatatcaacacggccgtcagctaacttgggagcagataggcataccttccgatcgtagcagaggggaacagtcttcagcaaaacttgatcacaatctttttgaatgatccgatgttcttccagtttctgctctattgaaggccaatattccgcagcatcaatgatcatatcaatgagttcttcgggcagaccgcgtgggaccttccgttgcaacaaattctgaactttgagtacatccgctatgctgggattgaaaacttgaggtcctgggtccgagatacacgtatccaccccatcagaatctgtgccgttcgtgtctgcagagggttggccatgggaccggcggcagtttcctgggcgaactccgaaaggtaacatggtagtaatgagaaatctaggtgctgacttgaatagaaagacgtcgatacgtatgaaatttcttttcgctctgtattacctagcctcgggagctagcttcggctttgtttttgtcgactcgtatgtgcacctcaccccgcatgccacatggataaataaggctggaactaaagtacttcactttgggcggttcaagctattgatttcgttgaacgggattcaaagtaaagtgatgttcaacgtgagtaatatggatccgatggtggaaaggaaacagttgatggtcgacaacttgtacggagttacccgtgaacgttgattgttgacaatgacgtcagtgtccccagttataactagctgactttgcatagattaactatctccagggctggaattactacgtagatgctcaaattatgcatatctggtctcgaattttgtattcttcctacaatatattcaaatgcccttcctaacgcccatgagagatacaataaggcttcttttattttcagccccttctgccacccgcagctttgtatgcggcagcccgcttgctgcttctgctttctcgcttggccttcgatccacggcttttctgcttcattttgatggatgatgatccctcagtagcgcggtgaccctcgaacacgaaagagttgccggcaatggtactgttagcatcggccttcaccttggccgcacccgctcggcccaatagcctgttggcacgtccttgcatcgttttctgggcctcatctacacgagacttcttggtctcggggccggagggttcgcgcttcttagcgattttacgggctcgagtgacacgcagcttgcgggggagcataggcgggaagttctttccattgagcggaagcgattcctcaacaccattgccatcgtagaattggacataggcaaatcctttgccaacacgagtggtgctgtcacggatcacgcgcacgaactcaacgttcttcttgatggccttcttgtccttgcctccagtgtgggcgttgaaaattcgccagagaccctcctcaatatcggcgggagcgcgaaccttcttcttcttgccggtcttctcgtcctcttcgggagtctcactgtcaatgaaagacaggttgccgacaaagacacagcgcttgtggtcaatttctgaggggtgagcaaggctatcaactcgcaaatgacggtctaagaccatggtgccgttcaaggcggcgggagccttgcgtgcggcgtggagagtggtgtagacagcgtatgcgttggtgctgggtgtggtctcatcgaggatctcgcgcttcgcaaaggaagcacgcttgggaatgccaccgccactggcgaatgcaacagagcggaagcggatcgattcgatcttgtgcgggccggtggattcaggaagcgtcgaacagaaagaggccaggtgcctgagaagtgttttcttggcagtcttagatctgatagcctcggtggagacgttgcccaggaagacagtgcggttggacttctcaacttcatcggttttggcggaaccagtcaagctctcgtgcacaggtgcaggagcggcctcctcgtcgccggtgtcttctgataccgatgctttgtctgagtcctcgccttcctcgccttcctcgtcttcgctaccttcttgttcggtctgcttttgacgctttgcttgctcggacttcctcttttcctcatccttctcctcctcctttgcaatgcgacgcatatatgtctcctcgacatcctccccggcactgccacgcttgcgcttccggttctgtgtatcggtaggttgttcttcctcctctgcagcatcagaatcgctttcttcgccagcatcttccattaattcatcgcctgatgcagatgattcatcttcttcggcaacatcatcttcgtcattttttgcctgttgtgtgggcttgacgtacttgatcacgggtgcttgcacaggaccagcctatatatggtcagttcaaagtctgttaattgcgcctcaagacagacatacactctgcgcaaaaagcgaggacagtgttgggtccagagatgcaccaccgaagggaagagtggcagcggacgtgctggtcttctcctccgtcttggacgaagactttgacttcttgcccattttgatgttcttggtctgtattatagtctaaaatcgagtggccaggaggtgggtttgttgcgattgacacttgcgccgatgatagctccgactttttttttccctttagtttctgcttatcgggtcttggcatggaaagataattatcacgtgaccaggaatacactcaagagtagatgttcctacagtatgcggtatatcagacgttgtatatgctagatatgcattaatattaaatatgcatgctttctgtattacttattcttcttgtctgcaagtacttcactctgtctatgtattccaggctgggaggttcttatttgggaccgggcggtaagctgtggatgtatgatgcacttataaaccatctaacctagtgagactgatgaacagattctttgttcttcattccttccttctggcataaaaatgcagtatcaacatattattctacaggatggcctgtctctttccaactacgtcagatactatatcacgtgacttgcttttttttcttcgggcggtgagctttaccctcgccggaacgcaacgcggcagaatcggcggtcactcgcttctgttgctgcaccccatctagcgatctgctgcttttgtctgttgaaaccccctctttccgctgtgattttccatccctgatcattggtttgatcttgatcaccgtccctagccacttcttcatgacgccaactcctctgcgactcggtaccctcgtcttgtccgcttcctagccatcctcccctcgtcctccagagtcggtctgcgtaggattcgtcggaccgaaagcttttaccggttacaatagtggtgatacgcgtggacctggaattccgtcataaatcgcgtctcaggaacgcggtggttttgggaatcgtgctcggtcgcgagcagctgtgctcattaccggcgtcgctcccggcgcattgttgaaacggtacgtcgcttgaggttctacatcaaccacagacctcatctggtcattttcgtggggagggagcgtctctatatcttctggaactactgtgatcggtacacttgctttgcgcggcctctagtccctgtgctgagcgactgttaccgaatctgggggcgttcgatgatcaatctccgcaccaccgccttctgggggcgctgacctatctcgcacccaccaaccactttttgcccaccaactccgtttttaactggttttgccgagttgatatggcaattgagctaattctatctgtggtttctccagattctcgctcgaaacaccatctggtggatcggtgaccttccttcctctcacgcccgcggctaatctcaacctcgctgcaagcaagcaaccaccttatactctccccttcaaaccttcttgtcttcattcacatcgtgttgcgccagctctcttagctgcataaatctccatggaggtagccgagagcagggaacaggcctccgttggtcccacaacgggggcagagtctacattccctaatggcgagcggaacccttttctggatgacccgctcatggacgatgatggacgctcaagtagcttgagtgagatcgacgatgtctcggacaacgagccgtccgacttcgaggatccaatcaaatcagacaagccaatggagaatgattcggaggccgaaaccgagcgcatcgaagattctccacacaatatccggaaacatgacattgtgttgagcgccgctagtgccggaccaagccctagcaagcttcatcaatctacaacactcgatgatgttgacgatgaagcacttgtggcagacgattctcctagcaaaccgcgacggtcttcaaaaaacaatggcttgaccgaggatatcccagacctaggcgacctaggtgattcggagctgccagataatctcaaaaaacgaaaacacgaaactgtcgccgaattaggcgacgaagagcccacgaagaaacgccggagctcaatcaagagtgacttgagtgacccgatagacgatgatacccccctatcgcctgagccgctcggtaatcccatggatatcaatgaaaatggcatactggttgacgaagttcctgagtcggatctcccagccccgccttccaaaggcaaaaagggcaaaaagggtaagcggaaaggaagaagggcccaagacggcgatgaggaagcagaagccggggtcgaggccacaatagagtatgttgctgatgagattcgtggagaagacgaggagcctacggaacgagtagatgagcccgatgacgcagaggcgattcttcgagccgaagagtgtaagtttatccctttatggaccttttgggtgcaacatatactgatgcctagttcagcggtgaaaaagatgtctgctatggattcccttgtgacactggagaaagaatttgcaacgttacgtgacaagtaaggaatttcccccatctctcacatgcttcgacgctaataatcataggatttatgacgaacggatatccaaactcaaccgcgagttggagatgcttaccggtccgaacccgacgcatcctgagtacttgcggcagatcgaatgtgtgcaacgttaccgagacgccaagatcaaatacgaacaaaacttgttccgacaccgcatgaagtcactcatgcacaagggtctggccgagcgaacacaggctcatagcacatactaccagcggattcgggatgcgcgcgagcggcattcaagtgcagtcagcaaacaattctatgccattcagcatgatcgcttcaagacagacgagctaagcccgcaccatatcatcccattccccacccgccgctcgcagcaaatcgcacatcagaccgcatacaaccaggaggtttcaattatggccggtgtggccaagtatgttggcttcccggctgccccgtccttgatgggtgcacggccgaccgaacttgatgacgatcttgaaaagatgggggtaagtcatattcacattcactatttggtcagttgctgagagcaggtcatagattcatatcgagtctcgcgcttcggcaccacggcactcatccgcaataccgtcacggaccaccatgtctaccatgtcttccaatgctttccgttcggccgcagaagaagcatttctagaacaaacaccctgggcaaacccacaacatcccatccatcagcaacaacagcaacagcactcgcagccacctcgactacaaggccgcacatttgagcatccgcaacaatcatcatatgcaacgccagccgctcaaaagcgggtagtagacatcaatgcgcctaatggatctgcatccaccattcccgagaacgcctctgctgccaactcatcagccaacaacaccccttacggcatggagcaagatccaagccgtcaaacgcaagggcccttccgcaacccagattatgacaccgatcatcgcaaatctgggttccggtcattaagttcatctcccttggatgtgcgtaaatcacagccgcatatcaaccatgtcctcgaacaccgttctcccataaccgacgcaccatcccacaatcacatattctctccgccttctgcacgccaaggcttgtttcaaccttcagccgctccccaacgggagacctcgccatccctcccgtctaaacctgttgatgtacattaccgcgcccatcaatccggaatatccacaggtcctggttcaaaccatatgcctaatcgataatcgattacctttggcgattcttattgaaatgacccgtcagcacccttcttaataccccgagagtctcctaccctcctctttcatgcatcttgtgcacttttcttctcctgtgataaatcctgtgtttttctactctccagctcttgctccagcagcaaatgtatcttgactgtcattttcacgcgtgttgcatgaatggaataccaatttggggtcttgtccttgagtttcaacagcgttaacatgtggggtactcctgttgttattacttctcactttggattcgaagactttatttgaatggaacggaatctggttaaagctgttattattttatcatccgatggggtgtataaggtctgaatttgtttttttatgcgtgcggtagagagatatcttttgcattggagtttctttttattttcttcgttcctctagtgtcatctgctctgtctaatgatgtacatacgacgttcttattttatatcataaacttccttgtagtctatgttgcgaccgaactgatctatatatagcggggctgaacgttggaaccatggcggcgccactatctatcctaagtggagctgatctgatgctaagattcacttcactgattcgcttgaccctcaaagctctcatggatgcattcaaggttagagccgagagagagtaaaaattattccatcatggtagactggttttcgcgtagctaaaagatctatcataaaaagtatacatccttctgggtcctatgggttttaaactctcaacgatgaagcaggcagttgataacgtagctaataagatgtgacaggagtgacttattttagtcaggttttcacatacaacatgcaggtagctactgttctgctaatttcggggtagcggtgggaagaaccgggcaggagcggttcccagttaggaaggtgcacctaatatttcaggcaaggagtggtctgatccgggtggtctgaccgaagggaagtggtgtgatctatggggcgggtggaggtatgaacaccctctctctctctctatatatttccagaagcctaggtttgcatattgttgagggattcccagaaattgaaaatcgacacctcatccatcaacgcatcaatggcatcttcgccgattgttattcctgctataggatcctcggtcggtacttcttgcggtggagaagattcggatgccaactgagggagcgctgtttgaggagtatagttggggaaaatgtaacggatggcttcgagaaaaatacctcggaagaccgaagagcaggggtgagtgtgttgcatctgttccaagactatcatgcagacctcaattttgttgagacccagacgtcgggaaacgggatccggagatttgcagttgaggaggtggacgtgcattgctgggaccaacagcggtgccctggagtgattgtcagataagatatcatttgcagaagagttgcacactcacgtcatagagcctgagaatcccaacagcttctcctgtgccagactatcaaggatggcattggtctgtagcgcagccatgttgatctgattgcggacgtgggtttgccatgtgtcttggcgagatacgggcaacccttctgggtcttttgttatgaaaggacggtaaaaggtgattatgaatgctcttttgaccgtcagaagcagttaaggatggatatggcgtcagcactcactggtaatggagctgcaagtgatacaaggaaaaggttgcaagtggactttgtcttgtctcctgatcttcgggaattcgaaagcgcaaaatcttttgctcaagggcttcaacctgttggaaagacgaactggccccaaagggttggtagcataaggtgagagtctcccctagaagctgagtgagttgaatcattgtcacccaatagtctgctagctgcggtaggtccttcgggatatatattgctgatatggattcgggtaagccgacaagatcacccaacatatcatccgcagatggcggtacagtgttacagtcattcatgttgatcctcaatggacgacccattgtgagacttagccaacggtctcgaaagaagcagatccaccaaagacggcgccaaagacgctgttgttgcccagtgataggggaattggcgcagaccgaggcagagaaacgatgcagacccattgtttggcaaaggctgatggcaataccaagccaaaaccacggttgggtgtaggtatcagcctcggagtggtaaaatcccatgagaagtgctgattgaaggagaactgtgttgtctgtttcacccccattatgatgcaggcactaagagcaggccattagcaagcataactcggaaatagaaagaatgctagcttgctagcttgcgcttacctttgcacgagcgtacatagattccttcatctctttcctagacgaaaagccctctgatttccaagtatcggccggaagatgctatatcccgcattagcttgactgcagttctactcggaggaggtaggctttacattcgctgcagcatagaaaatgctccatagtaatatcagattgtatggttgaccatctccactgggataaaggtgtggaagtgtcgtagcgtcgatcaccggcataatgggatgcacatgatgaaagtatgcccggagaagttgatcgcagatctcttttcggggcatattgaagcatcctttgtactgcaggtatgctttatcctcggaagatagcgaaacggatgttttggaagtgagcaggatatgccttggtgcaggttgctgtgaaggtgagcatgcatcgaagatagcgccaaacccaggcacatcaccttcagttccaggttagttttgggtgaaaacactcgcgcggtgactacatacctgtgtagaatggcgcttggccaggtttgtagttgtttttccggaggactttggttgcaatttcaacgccagtctgttcttcatcatgactccgagaataatccgggggattagagacactccttatcccaaccagctcagggcggtctttatgcgcaggcggtgcagttgggaatgcatcaagtgggagtgcagactgtgatatcaatccattagaacctgcgctaggtggactgttaatgacagacgcggttcgacgcgtgtgcctttcgcgtatgctatatctgtcagcgataagcttctaccaaatcgaaagaaaacctcacgtttgggtcttcgtcggcggaacactacattctctgccatcttgcgtacaacctatacacggaataccggtaactgtcacgctacagcggactttgcgctgacggcaattctgacaagcagcggccgatctatagcggcgtgtagacatggcgaagccaagtattgatctatcggtctgccgagaaggtcgggtcgccgaattgttgtcaattaaaaatgatccgaggtagccgagatccgtttcttcccgggagttccgaggtaagtttttcccaagaattatgaatgaccctgagagagggaaagggggctgtatttactacgaaaaagacggaagaacagagaagaaaggaagaggagatcgaatttgaaaggttagagatatatcttcagagacttgttagttatataggatgtctgaggaatcgtgacctaggcaaatttttcaaaataatctttaatgagggaaagaaaacctgttgcattcgctagctaagagagagagaagtccaggtggggaagtcaggtcctatctactctgtacctgaagcaaacaacggtctcaacaatcttcaaacaacatatattcaagttaaacgcaaaaagtatctatataccctctatataccctctataaacttctatagtacatcagatcagatttacacaagggcaattccagtaaaggcccggtcatcattggagtaaatcttctccttgttgttgccatccatatcggtccggtagatagatccgcccaggtcagtaagatagatctgagaattggcgggatctaagatcaaaccgattgcctcgttcagatttctggtgatgacatcatatcccagagcggagctagctggcagaaggagaccttgttcactcaactgagctttgttcagtgagttgccgatcgggagttcaccacgatcggtccagtaaagtgtgtgagtggcttcgtgcacctcgagatcaatcggctcggggagatcagccagaacaacctggacatcacttcgagcatctggtgactcgccctcaggggttgtgatattggcgcagaagatccggcctttgccagccttcgagggtcctttctgggtccaatagaatttaccataatttggcaccacagcaattccgacgcaccagtcggagatgcggtgctgtggattcgcttcaccgccggtgttatcaatcaaaacctcgagattggagccgtcgtaggcacaacggtagacgcggcagccttcacggtcacagaaatagacagttttcgcctcggaatggaggactatttgtttcggtgtattgatagttcctggggcaatgagtgttttgatgtcggttccatccacgttggcggagtaaacgcctccgtcgaacttccctggagcgcccatgcaagtccagaacatgcggccagagatcgggtctatgatgagcccatcaggcaaggattggtccttgagaaccacgttctttagcgtgccgtctgcggcaaagcgaacgatctctcctgatgtcacgccgggtttgatggctgacagtccaatgtccaacactaaaaggtcgggagtcttgggagtagaagtcgactcgctagcaggatagaggccacccttcgagcactttgttcccagtttgccctggtccaggtaattggccttcaaaaagtcgaccgtcttctcgggggagagcccacgttcctgcacataatgactctcaatgaaggcgacggtgtctaggccaacatctaggcaatttatgttagcgaacaacttcccacaaaactagggagacgagtgaaggacttactgtccattgtccggcagggaagactctttcccttgatgaacagttcattccacatcgaatcaatttcctcaggaaccgaaacaccctcagccaagatagtcatgacctcccgcttcacagcagcccacagccgattgaagatgaacccagtggactcctttcgcgcaacatatggacttgtggcggcttccttggagcgctcgaccatgaaagggaagatctctggggcagtgtgtccatcggtcatgagctccacgatcatacacgacggcggcatataataatgcatgttcagaacacgcttcttggtggcatccgagatctgactgattatctcagaagatttgtatgatgatgagttggaagccaggatgcagtcctccggggcgagggcttccaattcagcgaaagtggagatcttaagttcgagcttctcgggaacagcttcaatcacaagccaggcgttttcaacggctttcttcatgtcttcgaaggcttcaaaggatccggggatttgctttgttttggcggcgtaggattggacattttcctgaatgtatgcaattccgtctgctcgctgctgcgagctagggtctcgaattcgaacatcgtagccggctgaagcccagatacaacctaatagccgaagtttgtcaacacttctatccattgaataacacgtgggatgggatacagaccaattcggcggccgagtacgccggcacccagaatggtgactgggcggttgcggtagttgctcggaggtacccagtgtgatgccatgctgcgacgcaaagtgttcatcaagtgtaaagtgtaaaatgtaaaatgtcaagtgccaagtatacagggtaaagtgtaaagtgtaaagtagcctagttggtatcttcaatcccagtggcggatgggttccttatatgccctatcgttgccgccattgtcactttgtcatcttgtaccaccctcggaataccagtatccactatcccgaccgaaaggaagatcaaggggacatcggccccgccagcaggccgaggatcggtatcctaatttgatcctcggaaactcccgggccgtggaaatatgatgaacaaggaaattcttcatcaaaagaggatttgtgcaggtggatctacataatcccaaggcgtcattaaggcaatgcttagtgtgtgtggaccaagtcgatctctttcttgggatccactatcttatggaggacgatcccgaggtagtttacctcggaacccatatagaatcccctgggggctaatgccaattagaaatttttgataggatagaaaagaataaatggcgcgtatggttcctctaagactacaatataaagcatttgcctctagttcattgtcgcgctgaaagcacaaccgtcattgatattgcatccttccatacaaaatggcatctttgaaacaattcgaggcgagcgaagtagcagctcacaacacaaaaaacgatctttttgtcatcattcatggaaaaggtaatctttccctccttgagctaccttgttcaatcttctaacacacccagtgtacgacatcacagactatgtgcgagaccatcccggtggtgcggatttgttggtagatgtcgccggtacagatgcaacagttgcgtttgaggatgtcggtcactcagaggatgcatctgagatcctggacacatacttggtcggcaacatcaaggatgcgcacgaatttgtccaacccaaaaaggtcgttcgtgtaatcaagccaatctcttccgttgcggagacacctaagaagtcatcaatcaccctcaaaacagcgagcacaattactgccacatttgctgcaactgcactggtttacgtctgttcgaagaatcaccgaaccctggccgacttctgcactaagcactccccggcgtccctacggatctccgaggtgcgtgttccattcggaaacattctgcatggtggattcttcagtggagtcactgctgccactctggcttgcgcgactattggcggtgttattggaaaccaactctcaaagttcaccaaagtcgactctggtttcaccaagtaccctccccacatgaaagcatcgacaatcaagaagcaagacccgcatcttgtgaagggcttcctagagcccaaagtctacaaaaaactcccgctcgtccaaaaagatcaactttcgcccaatgtgtaccgcttcgtatttcaattggccaatccacgggatgtgattggactcccaatcggccagcatgttgctatcaaagccatggtcaacggagctgctgtctcaagatcttatactccgacatccaataacctggattttggaaaactggagctagtcatcaaatgctacccagatggcattctcacaggccaataccttgagtccctagaagtcggcgacaaagtggaattccggggcccgaaaggcgggatgaaatatcacaatggtctctgcaagaaaattggtatgattgccggtggaaccggaatcaccccgatgtaccaacttatccgggcgatttgtgaagatgatcgtgatacgactgaaatcagtctgatctacgccaaccggactgaagaggatattcttcttcgtcgcgaattggaagcctttgcgcgaggatatcccaagaacttcaagctctggtacatgcttgaccatcccgatgagaattggaaatacggaaagggatacgttaccgcagaagtcatggctgctagattgcctggtccagcatctgatactaagatcatgctttgtggaccaccaggtatggtgaatgcttcaaagaagagtttggtggctgcgggcttcacagctcctagtgctgtcggaaagatgaccgatcagatcttctgcttctagccctggagagtgttttgattacataatctctctttttgtttcatgtttatagatgttgtatattagagttagaggaacttagagctgtttgtgaatttcatatgtttctattttgatatatttttgaaaatgcttcatcttaacttatgtatataagtcgattgcgtgtagattactacttgtagccttattcgattatcccagaggccatagctgccaagttcttctttcatcgatatatttgtttcatacaccatgtcccttgtcatacataggaaattcctttgtacagtttatgatttttacttatattgcggagtgtgacatgtctactccgtaatattatccattatcctttaaattataaggaaaatctctgaacaattacatgtagaaagcactcttgagaaaaagcatcaaagcaagacatcggagtgttaggacatgtaacatccatcccttccaagtatagccaggtgtcacatacgtggccacttgctcttgtatttcttcgttctagacttttcgagaggtctgtacttagagtggagtcggaagagagaataatatcatttcgggatcacatccccatatcgaaatgttccgtgggatcctgtgccttctgtagctggtttggattccgaaagctactgaatagggatatattctgcttagatccacagttgacagctacctagttacctatgttgtccatacgttccgaagatgagtaatgtctggtttacagacggagtgttgaaaatagataaactatattgagctaaatgtattttgcagatcaccgaggaaccaggccgttccgaggtacacgggagacatccgagatagaaaagagccaatcggaaaagcccatttagacccacaacccgaggaaataaattcccgatatatgaaacggccgggatctgtcgtgataaccattgtgcagttgatatataagtttagggtcctgaattgaactggctagacaaaaagcactcaatcacaatgtctgcaaagcaattctatctccttggagagccagtctcctccgccaagaacatcgatgtcgacccgaaaagtgatttgggtgaactcaaggatttgattgcagctcacttcgcaatcgttgagccaaatggtaagtttgaaggacttattctgatttcaggtggtaattactgacgcgtgataggcatcggtttcgaagctcaagactcccagctgagcgaagtctcggagatcacttcagccaccactcccgtcgccatcaccatcgatggacaagcggtccgtgatcctcctggcccgaagggcctcccctatgtcggaaatttcttcgaagtctacccagaccatcttggaaaccaccagcgtctcttcgaacaatacggaccggtcatcaagacagtcaatctgggccgcacgacttatcaaaccaatgaccccgctatctccgcgatcgtttttgccgaatctgattttttcacaaagaagattaatgaggcccatccactctatcctctaaagcagcctagcgctggtgttttccttggagatacggatactcccgagtggagagtcgcccacaagtttttaccgccagctctcggcccgaaggccgttcgtcactatgcaccaacaatgcagaagacagtggaggatgccttcaatgttttcgataaatttgatgagcagggtgaagcctggaatgtgtatcagtatatgctgaagctcggagctcaagcagtgggcaagctcacgcttggcttggatttccaccactttgactctccggacgcgaatttgcatgagatggtgcatttgattgctgaacttctttctctcaataagaaagtcgcatccaagggagattggtatggtaaactgccattcggtgatccacagcggctccgaacgatcaaagacagaattgcaaagatggtggaggaatccattcagaaagctgcacgtggtggtgttgaagacctaccgcttcaagatgcagcgctgacagcgtctaacatggtcggtaagtggctatcatatatcaccaaatcccctgcttatatccatggatgctaataaacgcttcagactatgccatccgtgcaaccgacaataaaggtgagaagctgccccaggaaagcttgatttgggctctcgtcgtcgcaaccgcagccggcttcacgacgaccagttcacttctttcctggctcatttacggccttgtcacgtacccaggaatgcaagacaggctactccaagaactcgttgacaatggcatcgacgaaaacaccgagatcacagcagacgttacagaacgtctcgatttcctcgataagtacatcaaggagacccagcgtcgccacaacccgagtttccaaccgggacgaaccgctaaggtcgacctagtgcttccgggagggtacaagctcgccaaggactcggttattctcccggcgctgcaccacatccacaacaaccccgacctgtgggataatccttaccagttcaaccctgatcgctgggacaccgaggcggtcaagaacagacataaggctgcgtatattccattcgccaccggcccgcgtatgtgcattgggttcaactttgccttgcaggaagttaaggttttcctccccaagctcatcttccggtacaaattcactcgggagggcaatgaccccatcgagtatgaccccatgttccagttgattcgccccaataacctctatgttcgtgcggagaagagggtgaaatggcctcctaagacggagacattggcaacagcggatgtttgagagcatcctagcatagatagatgatagatgtttaagtaacaggcttaggcaacagcaattggtttgagaatagaatgtatatgagaatagagaatgtatatattatctcgtttataacgaagaacttcccgtctagcaaagcaaaggtttttcttgagatgtataaaagcgattttatccgaaattctatttgactggaaaatagtatactcgtggcagacggtctttgcaagatgaagcatagctaccaatgaccgcatgagattgaaggtcttgataaaatgcagtgaagctataaacggatattcattctctcaaaagacaaagtgagggagatggaggcaccgtagatgtcacatattcgaagattaaacccgtaagatggatacactagaaaagaggtataatgaaacggggactaaaaggcaccaaaccgaaggcatgtgcaatatagataaaaatgcccgaagaatcctacctggcattcaaattgcagaaaaatgaagaactcatctcatgtcatcatcttcttttcatcgaatggtacaaataacaagattatggatctgaagtagtaggctttgactcagatgattctggtgcgtcatttgctggcttcagcactgtgctttgcgggcgccacttggtgaggaccttgcccgcagcaggtcgggattcctcgtctgttcgtcgcatgttagatatatatattaccagtggatattagggagggggtatatttacaagtctggtagacatcctctactgtgttcaagcacatctctcgtgctggaggtcggaacataatcaggtacctaaaaggaagtcagcaagggagttcatgatagtggaaaaagtggaagacgacatacatcaatgattgaacgcaaaggttcacacgttccggatctttggccaagctggccacccgctgagtgataggaattgtgatctcagggacttcactgagaaagcggaccagcaccttgatatctcgagagtccaaataagctaggaaaccatccaaaagtcgggtggcccaggtatcgtagttaagagctacagtcggctccgagtcttcctcggtgtcatcccgttgattggcagcactcttcatttgaattcggtcattataccactcttcattgagccagataatggcaatgttaagtcgccctcggaaatcttccaagatgaaccgatagagcgtttcgcggatcgagtcggcaatagttgtttgcctacgtacggcgtctcccttggttggctggtcattttcgagaccggcaggtgcccgtgtagccagccgagcaagaagaacagaccatgcgtcccggtcaaatgtactccctgctaatctagcgaaaccgagcttttgttggcttagacccttggcaggcgcaggcgatgtttcggctgcgttcaacattccgaacacacgcgcaacagcactccgtccgatttctccagcctcttcttcgctcaatggaggtggttgtggcaggacaaagggacccaatgagaccaattctggttgtagatctgctacctccgccgcaacagcactagcctcttctgaaataacagatgctacgtccatgggctggtattcaggctcatagtcatcatcctcatcttgggctgctgctctctgttgtagctgccgttgcaagttttgatcctttgtgattgtctgatatcgagtacgaacagcctaggtcatgtcagcaaaggataaggcttcactcctatgaaggtacttacatcgacagcttgtgcaagtgttgaatcatgtacttgcgacaagagcggtacaacaatcttgaggactagatcaattggcagctgttttacgtcgaaggaggaaagtccggtgtcctcggtcaaggtgaagagtcggtcaaagcttgcaggccccggtgccattggaggaatcttgagcatcgggggaggcaaagcatggagacgcgccctcttagcgttgtcaagtccgtcggtaggttcatttggcaatccacgtttccgcgaagcgtcgtcagtggcctcaagtcgtgattgcattagacgttcaatgtacatttgcatccgacccgctaaggggtggttcgggttcctatgatagtcaggtcaaaccacatctttcgcagccaggatgacaacatactttttcaagatattgataagcagagctcgagctgtgcgctccatggacttgacgctgacgcgaattgttggagtaaacggcgcgtggacgtgtttcgcgggataaaactccaaaattgtgttaattatcttgtttgctacggactgacgtgtccggatgagaggggcgaggcagtttaatgtcgcattcacaagaagagcatcactggtttgtgttagcatcttgatcaactcgtaaaataaattgatcctcatacctagtctcttcttggaaaacgccaagtagtcgatcgagaagacctgaggattccgcttccaggttcggtattgacagaagagcatgattccggggaacaacggccaaagacgtctcgttctggtccggtcgctgattgaagttagtatcgacacatccaactctgtataacccgccaagcatacccttgggtccgagatcaatccaggcgtctgaacctggaccacacgctggatgaacttggcacagcaaagcttaaccgggcatggaaacgagtccattctcctaagtatatcttgcttaatggcagtcattgtctcccatgacttgctatcctgtggatggttcactctgtgtattgttagctctgcacgaggtttacgtttgtaacgcgctcgtgcgtcgcagccacgaaagattgggaataacctacacatgtctgaagacaagaggatacaaactagctgaagtctgtaccaagctctgtaggactgtcgtgtctgtttccggcaactctagaatctcgcggatggtctgtaggacattcggtgccagctgctccttctgcgcaacagctaacattgggctagcaaaggtttctgccaggaagtttgcaccccatcttcgcaattccaaccgtgtactagctccgacgatgggaaggataccgttgacgatctgcgggtagaaggcggcatcgccgagaacgagactgcgggcggcattgagctgggcgacctggtcgatgacattgtccatgggctgagccattctagctctaatgaggaggtatccggtacgcaacggacgtgtcggattcgatttggtagactaggtgttgggggaagggaggacgttgatgggtggatggagaacacggatgcagttgcaaaagcaacgcgcataagcttgggtttgcgttctcagaactaggaaatagcggcaaaataactccgaagttggagagtgttagtggttatgcgatgggtgctgaaggaggggcgattgggaagtgaagttgatggtcgtcaaagatgcgacaaaagctgcgaggcctcaaaagggcggctaacaaagcctccgatgtatgtgagctccgtatctctacataaacttgatgcaccgagctcaaagtctctgtatgcttcaattgcttggaatttaatacagccagtgtctcaattacaatcaaaagtctcgatctaatctcaatacaaacatctaaattcgcatcacgttgtctgggcctccaacgccaagacttttcctccggatctgccttctatgccctcaactttcttgtctctcacgtctctcttaacaaacattcccaccatggctaccggaatgtatgtatagtgtctatagactcagagaggtctcatcttgctaacatcatgctctgtgccagcttcaactctacctactacggcaaggactaccgggccggtgccgccctcctgcgcgcccgccgcccatatctgtttaagaataccctcacaggctttggattgttcgcatttacaattgcagtctgtgagtaaaccctgtgtctgataccgatgtttttccgcttcagcgctgctttatctccgaaccgcagacgatcatgccaccaggacttggccgctgagaagcgggctcgatatctacaagagacaggacctcatgctaatacggcttctattttcagatacatacaccctcaaggctgtcggccaagaagactttgccgatgtcaaggtccccgatgcccccgccgacaagaaatgaagcacacccaacataccggtacttggggatcggttaacgctgccatcggggttttggagtcttcagggagaccttgtttttcagatctgtaggattagcgataatatcagcatttgtgctgccgtgcacagaaggaatttggaatataggctgtacaatgaatttcggctacggatgttatttctatgtgccctaccaactccaaaaagaaaccccgacttctcctcgctactccaactctgaatcgccaatgtcacgtagtgaaggtgacaggcagagttatttaatagccttctgagaagaaaggcattgatatataggttaggtaactagacctagagtatattggtatggttttgaagcatagctatgccagagcgaatcacaacagccaacaagacaagaaaactcaacgtgaatctagaaaacaaatctctactcggttcgcagaacacgagggcccttgtgcttggtggcacgcttgcgcttgaggcccttgtcgaaggcaactgcgttgctatgatcacggccgaggttatccaggtccttgaccttgtatagacgaacgatccagttctcgctggtgaatgcctcttccagtgtgttgagttgtgggctctccttgggaagttttgtgttacggacacggtccatggcttgaccggccgggaagagcgactggaagttgtgataagacatcttgtacctattgatggggttagcagtaacttggataattaagatgtgaggttcttacatcaggctgttcttcatggcgggagtggcttcttcgtcgacacggtactcgccacgagcggtgaagtagtcacgctctttcacctcgtctggccagataccctcggcaatacgaaccatccagaggaacttgttcaaatcgtcacctgagtagccgagtagtccaccgaacacgaccaagacgtagtcgacatcgtgctgtcggagaatagggtagctaacttcctcgcgcgagctcattgccttgccaacagtagcaatatgggtgttgttccaggtgttgttgtcgaccagggtggggcggtcagccataccaccgatttggtatccataatcccaccaggacatgatcttggcattgtccggggtgttctggcggagccaatagtaggcctcacggtagtcatcgatgatgaattggcttccatctggaagcttgctagccagaaccacagagggagaggaatatgcgttcgaagtaacccaggtgcagtgtgcaacgaacagaagcaagtaaagagtgaccgaggctaccacgacagacttggaaaaccaggaatagataccgacaacaggattccgggttgaccgaagtgacttatcatccgtagttgccttagccttggtttcagtgctaggggtcgatgcaaccaggaagttatcgaggatgcatgacaaggccagagcagccgcaacacacacaatgggggtcagggtgagcatcagacggaccataacaccagcgaagtaactagcaaggacggagtagatgaccacaaagacatgctcatccttgagtttctggaagcacatgaacactccggccgggaacagccagatgaggaagttcaggtcaaagaagaaggcaggccaggcggtgggctggtgctcggagacggaggcaataattgggatatgaatcttggcatatccggtatcccacagagagtagaagcgaccactccagggagcaattacccctgagattgatagcaggacaagaccaccaaatccaaggccaaacgtaagtaagaccatagaagtgaggagcttctggaactgcttgccgggcaggtagcctcggatgaactcagcaaacgcaaccaattgaatcaacccaaagacacctatcaaatagttagaatgagacaacgatatggcttagaatccaaaaaatcttaccaagtgcagacatgtggtcactgttgcgaataggcaggaaaccgacaaaggggatctgcatgcttcccaatgttcccagggcgtaccaggtggtgtagctgatgtagacacgggtgctgtatcgtcccatgcacagaagaacaaagacatgcagagggatcaggttagtaatgaagacgtatccaccccaagcagaaaccatatatccatagaacaatgcagtcaaggctccccacatgatcgagccgttcttcacagccttgatccagaggtagaatgtgaacaccaataggaaaatggcaatggcttcattatcgtagctgcctgccacagaccgtgagatgtaaccgggtgtaattcccatgaaagcagcggcgagaagacctgcggaaggagagtcggacatctcagaggtaaggagatacatcgccagggctgttagtccagagaatccgggggcgagcatgacacagatgtttcgaatgtcgacggggatggtgaggagacgaaggatgtggtagatcacgccgctggtcaccatcaggccagggtacaatgtgccaccagtgacacgcccaagagggtgccatgttcctatagcacgagcattcccatcagcccaatgtcatttatagtatcatgcggaggacgtgcaatcacggggaaggggccttacggtcatcaaaccaatcccagaagctataaaagccattttcgatcaagtattttgtcgcacggaagttgaaccacggatcgactagagtaagacggtatcaatatctcgtttgtttcgggggttatcgaggtggccaccgcattcagtgcagcaacatagggaaatcatacattcgtggatgatactttcaaatcctaaaatatagttagcatactgatcataaaggaactcaattgggacatactaatgacactgaacaagcggctggacaccgcggcggcggcaatggtacagagaatgataacccgcaatagaccgcgcgtattgcggccggagctgcctttcaacacaacatcaagcgaagacggggccatgatggccttgaaaacggagcgaagtccagggtcagaaatcaaaatagaaacatgaaatcaaggaatgaattgggctgagatgccagtggtgagggccgtggagaaggatgggaagagcaagagctgcgcaaggtggtcacttctgaaggtcttggcaccagccaaaggcgccacctccgattgctccccgcaatactacgactcatcactaatatttgttagagctcttttgactagattttgactcaatatacttgccactattgggtacatcagtattcctacagccatctacacttcatctacacctcacatgcccacatggagctgcctttgctgaccacggagcatctctcaaagctagtggcctccaacgctccaccgtcccaactcttcgaggccctgtcgcgatatgagcttcaagcatgcctcatttctaccaggggtgacagtgctaacacaggcggtagtgactctacactattgagcctattctactcgagcttctttctcatccatcttcttaccgaccaagtgttagttgcttagcgagtactattggtagttacgacactgctaatgaagctcgggtcccaggtctgaagctcgtgccttaacgaaacaaattcctgaagcactgctgcaacaggatccttctctacagaactgcttgactttactgcgagcggtatggcagactcaacacggccaggtctaccaggtactccgaggactaccatggccagacgttttgcagccattggttcggagatatgagagtatgtttctcatcgaaatgagcttcttctttccgctggatcttaaattgaccaatgattctgcaattaggtttcttccaagacaagactttgatcgcagtgagcagatcctacgaagctatacgactagcgacagcagcaacccaccttggtcttgaccaaaatcttgccaaagaggaagatccaaacataatatcgaatttcacgaaatatggatggacatgggatccggaatcaaagctgctgtatcccaaacctatcgttgtatcgctcgcggagcctcagtcttccaacgggatccataaggcaatggcaatgctgggaacgcgtgcagggtaaatcttgcttggacaacgaaggaatgtcagttatttggtagatccaaacctggactacaatggctacgtcctctgtcctacggtggggatgcgaggaccgagaggaacgctaaaaccaactttggatattggtctgatacatactgggacaaccggtaacgccggaatgtaacacgatcttttgctcttgcttgtggtccaactgtagtgtacaggcgcatggcagcccagggtatgtacaggacccagataaaacgtctaaaaatgagaaacaaaaaatcgttccatcttgcgctcgcaatgccacaactcggggcagatcaaacccaaacaatcgtacaataagatggaactgagttgagcaaaacatgtctaataccctgggggaggtgcgattcccgcaaagagatcattgcatagcattcctcctctatgccatccatcatatttaaaccttagccttcaagaaggcctccaggtcgaacttggggtcctcgaaattcgtgataactatggagttttggtcagtacttcgggttttgaagatattcggcggctccggatgtcgttgcatttgtctgaattgcatcatccgaggggaatcaaacgtacgtccgctggtctgtgtcttggtctcttgctggggctgggtcttcttcttgtattcggccttggcctgctcgatcaggcgctccttgcgagcatactcgtgctcgatctctgcgcgcttggtaaccgagttgagagaggactggtggtaaacaccgtaaacgagaccagcaacgagagccgagtaacggaggacctgtaggttgggagacgtggttaacggccgtcgggggagagggtaacccttagccggtactcacattgacaccttggctagccatttctgcgaggtttccggaagacgggaattaaatgagggaataatgtgtgtaagaagaaggaaccgtgcaacaggtgtcaaccgtcaatggcaataaatctccaggttggttaaatggcgaggttcagttcatgttctgcgcgcgcgagtttttccggaccgctccagagttcccgaagacggagattagtcatccccgtaaataaacgcgcagtggaggtactacacttggacgtggacgcatctggtctaaccctctataattgtacaagatgtcgatgcaacagcgcaaggatgaaattctcgcaaagcgggccaagcttgccgagctcaaaaagcagcgggagctgcgccagaaggaattcacctcccgaaccagcgtcggggatgcttcagaggtaaatgcggcatgtaaatgaactacggagcttgtccgggtctaacaaccttcctagattatctcaccgataccaagccgcgcagagaatagacacgatctcgatgacttgatctctcgcttggtcgaccgcccagcgtcggcctccctcagccacggcgtcgatggcctgtcgcggagaggaagtcggccaacctccgtgttgagcgcgagccaattaagcggggagaatacagatacatatgcagctccgtcgcgaccacaatcccagtccattgccgtccagacaacagatgagccttggatttcatctgcaacggaagccccgcagccccctgaacttgaacccgaatacaaatctacacccaaaccggaagttgtcacctatagcaaagctgtgcaaacagacggactagatctccagcccgagacccctgaagggtctgtcgcttcggatgatgaggagtcgcccgatactgcgcggtcgagcaagcgtctcagtcgacgagaccgggagcgggacgaggaaatccgacagaagcttcgcaaggaaattgaggaagagctccaagctaccagtcagaccgataataatgagaacacagctgcacagtcggcaaagctgcgatatccccttcgcaaactcgacgatgacgaactaaaggcagtcacatcatcgaacgatttcctagactttgtggagcgctcttcaaaggtcatcgagcgagctttggacgaagattacgatgtactggcagactatgagctgggtggaactgatgggcatctgcaagaagatgaggagactggcaagaaaaggagaggaatgcatgaagtgtgtcatttctgggacgaacgatggagcaagaaccgcattatcagtgacctaagcttctctccaaaggcaagtttctacttccaatacatgtgctttggctcatgctaaccttaacttcagttccctgaattgttgcttgcgtcatacaccaagaatacttctgctcctcacgaacccgatggccttgtccagatttggaatcagcacttacaaactcgtccggaatacgtgtttcactcgacatccgatatccttacggcaaaattttctccctaccatccaaaccttgttgttggaggctcctattcgggacaagtgcttgtatgggacactcgttcctcgcgcgccggtggaggctctccagtacaaaagacgccactatcgggcggcggacatgcccatcccgtttacagtatctcgattgttggcacacagaatgcacacaatatcatgaccgcctctacggacggtgtggtctgtggttggacgatggatatgctctcttacccacaagatcgtgtggaactgactacacctcccccatctaagaccgaggatctagctccaaccaccatgtcattcccccacactgatccaacgttctttatcgtcggtactgaagagggagtcatctacccatgccatcggtacgatcgggccggtgccaagtcgggcacagaccaccgtctagcctacaagggacatacggcaccaatcatgtctaccgcattccaccccggtcgtggacccgtagaccttggcgatcttatgctgagctccagtctggactggagtgtgaagctctggcgtgtgcggccacctgcgacgactgcctctgccacatccggcatggcccaatcgcaagtcgtctcgcccatactcgacattacccgtgacgatgttgtctacgatgcccgctggcacccaaccaaacctggtgtgttctctcttgtcgacggtgccggcaacgtcgaagtctgggacctcgcttcagataccgaagtgccagtcgcgcgtgaagttgttgacaatacccatggcaacatcatgtcccgaagcctcaacaaggttgcgtgggacgaacgtgaaggacgccgcctggcaactggtggcctcaatggtgtcgttacagtctttgaagttggcaagggtctgtgtggcctatcggaggaagtgccggcggacgaatggatgggtatgaagcggcttgtgggaaagctggaacagaaagataaggatcgagtggcttagagttaccactccaatggcttgtgtcttttccgatgattgtcgatgtagttttcttctgcgggccgaccttccccgtctacctttttccccgcgaggcccccttctttgccatatacccccttcccttcggtcacataatttgtgcatgtgtatgtatctcatcgccattgcaaacgtcatcatgttcctggatccttatcccctcttcatctccaactggatctttaccatgaagatcgtgaagactaataataataaaaaatatgtgaaaacaatctactggcagactcaagatcagacaccaccttgggggagacgttgctgccaagaatgtttccccgatgatactcagtacacagccaagtctgcagatttggtatcttaagctagtcaaaccttcgtcattgactatttctttactcttatacaaatatgatcacaacttattgtgcgtcttgaagatctcgaccgacaagatcgaaccaatagccttggaaggcaacgaataatacatgaaaaggctgtccatagttcccttctatccaggattcgtgaagacgtcagcgtatacatgtatgtgtctattcttgttcgatatcaaaagtttcaatccatccattggtggataatatcgatctgcaatgccgagatcggtgcgagattattcataattctaaaaaccttaaaacccccgaggcagaacccaaaagagaaagcaagccaatgtggaaccagaccagttcacgaccgtttgcctaaatcgggaggtaaccaagcttctggtaaacctaatctatcccatagctacctcatgtacatacgtatgggctacaatttccgcgtgaaccaaagcctgtcagcttcgatatttcacggacatgttcccgcaataggacatgtcatgatgtcacattatctggcttcgagggcccctttgagccatttgggagcgatctcgaggcgagatggaggatgagaaagggacgaatccacgggtagatttctggaagggctcttccaagatatgttccaaacccacagagtcggttcttgcgttccatggaagatctcaactctaaaataatagagtttcaacggccatgcgcctagtgttgatttgaaggaacaccactcttgctatgtgttctccattttaaacgtgttccaatggtcgactacggcccttgcctcatatgcatatatctccggtgggtgtatttcggggatttaagggttcgttgttgaagaattttcttatttaatataccatactgtccatttttcctcgcccggttatagaacatagaatttcctacagatgaagatttcaatttcccttccctcgttatcatgggtgccgactggaacccgggtggccaacaaccatataatggcaattccatagtgggagctactgccgccattgctgcggtgcaagttgtcttcgttgcagggaggttctatactcggtttatgcaacggatgaaaattggtatcgatgactatctgatcctacttgccctggtaagtcccgctcggagatagctatttgaatatagtcatactaatatctctgctatctaggctacaagtttggcagaatcagtgctctttattgtctgtaggtgcacggtctcagcacccatctcgaagaacaacgaaactcacatatcatgcagtggccaagatcggcgtagttgggtaccacttcgactacgtatatcggatgcctgataaagtggctctcacgagaaaggtacttaccccaatcctttgatctctgagaattgcactaacgacagcatctagtgtatccttgccttcgaagtcctcgattaccctctcaacatcaccatggccaaaatggccctattatgcttctatctacgcatttttacaacccgaaagttccagatcctcgtctacatagtgggctcacttgttctcgcggtgggagtcagcgttcttctggagaatttcctccaatgtcgaccattcgcgtacatgtggaatcgaagcatccccggcggatcgtgcatcgatccagtcgacgcttatcggattcttgcgccatttaatgtcctcactggtgtgttaatccttgttatgccaattccgactgtgtggaaattgcatacatctagaaaacagaaactggccttgacgggtgtttttctgttgggtggactgtgagtgattcaaactttgccatcatctgcgcttgaaataaatacatagtattgatgggacattagaggaaatgtggccagcatcttgagaatggtgatgtactttgccgaatcaggtctcgctaaggaggacccgacgtgtaagaaccaatcccggacttggatcgaaacgaggactgatctataacaaactagggttcgcggcgaaatttggtatcctaacggtcctcgagggaggtttgattatcatcgctgcttgcattatcagcatttggccccttttcactcaggtcatgccacggcgagtcatgccccggcgttttcacacaacattctctcgctccacctctcgcagaactcaacacctggcctggtatttgagaagaatacccacaaatagtgaaagccaggaaggcattgcgcgtcctaaagaggttagtttgcccaaaaaaaaatcttggagtagcttgccgtccttgctttcctcgccttcctcgttagcagatttggaggatcagagatggtcaatccttatggacgaggaggtgagtggctctcataaaacggttgcggggactcattaataaaaaaataatttctatctcttaagtgtataatgaatgagccaaaaatggaattttagaagccccccataagtgtaccttggcttgtcgtaaaccagaatttatctatatatcataacatttgaaaagctttgaaagcggtatctgtattcaatgaatacgggttttgccgagttttcgtatttgcatttggtcagtaagtgtatctgaagccagacttttggatttcattcgttagcaagatataatcggccggccattgatgaagcacactcactacaccctcaagaatctttaatcctcgcttttgctgtcgattgacaatgtaaaagtaaatcgtgaatgcgccgacgatggcaatgagaagaatgtgagacctggtaatgttgtcagccgaagtccaatgttcaataatttctgaaacttacccaattgacacccaaactgcggtctggtattgcggggcttcttgctggcggacaataaagctgcctgctacacccccgagtccgttacacgcagtgaccgccgccgcggtggccactcgtttccactggccgacgatattgttggcctggaaggcattgagggcagcccagttcgagatataagcaccggtcgccagaaaggtcccaatataacgcactgccacccgggtagatacgggaagaccgaacatcaggaacccagctatgaggacaagggcattgaagatgatcagcggcccacgcacgcggtagaaatctccgatcagtgatgtgagaataaccggaattatggcataatagtagggctaataaagaagttagagaatgcggcgtttatattctggatcaacttaccggtgtggagagcagaatggatttatttgagctgaaacccataccggactgtaagatgatgggtagaaaatacgacaaggcagtcgatatgagattgagcaagaagaacatgatcgcaaagccgtagattttcggatccttgaaattagcaagaagcgtgccccaggaaaacggttccgggataacatcagctcgatcatcctgaattcggcgcgttgcgaggcgcgcttcctggtctgaaagaaagcaaaagctgtgctgggcgttctcggggaagtcgaccatccaccagtaggtgataatacccaggacacaagtaatgagaccctgaacaacatacatccagcgccaacccgccaacccggccacgccattcagatgattgagaccaaaattgacaatattaccagtcgcaagaatcacaacttccccggactgcaagaatgcaaaccgaagctgctgctcttgtcgcggataccaggcgctaaccaggtaggtcagaccagggtaaataccggacatggcgataccgagcagcacacgcaggataatcatctgctgccagttgcgcacgaaagcagtgcatagcgtcaacagcccaaaggtgaatgtgattgtcgaaaaccagattcggggaccgacaaagcgaactgccactgtgcacggcagctgaaagatcacactggcaattgtgaaaataaatatggagacagagaaccggttgccctggcccagatcaagatcatccagcatcgtcgtcaccgatgctgaggacaaaatgcccgagtctagcaaattgagactgcataagagcccgccgatgctacacaggcggagatcgactttccatcgtacccgcttctctaaagcggcccactcgaccccgcgctctgcgttgagcctgttttgaccatcttcaggaggagcctggtcgaatatcacgccgtcggactgtgcattggtctcttgaaccactggatccaaggtatgcaggtcttgggccgttggtgtcaaagtgaacgagaattggcccttctctgaatcgaccatcttgactgagtgtctgaaggatcaggccaatcctcgatttccgtaatcagatatgtcgcaagttaagttgctaatccaatatttcttttgttttttcctccgacattccaggataagaacgtgatagaaaccggccgagtagtgcgtctcttagcgcgcaagtcggacctagtcccgaggtcggattatcaatccagatatttcggagtatttttctcatgatgtggcagtttatagggtgcaggcaagccagtctatgatcaatcacccaggctagtacggagtagacgcgtacatactttgaattcccacagagagcatgtgaccgggcacattccaaattggccctccgtgagatggcccctctttcccacaatatatattgcacgctgcacgggtaaattccgaaaagtcgcatacatggaggctttaacccatgattgaaacccccagtttacgcttattttacctgtgattacaatctaccgatgaatcgtgtccgtcacgaatcaaacgaccgatgcttcggttgcagcagaaaatgcgtttcttaaggaagaaaacatccgacttcaccgactcctcgatgctacaatactatctcaaaggaaatacaggaggatgttactgaatccataatcaacctctggtccgaaacctgtttgatcaacagggcccagattagaaatgccccgaggtcataggcgacaacttaaaagccacaagggatcgcatatatacgtcaaggagatcaatcgaaagttcgagggagcagacgaagaggcaaagaagcaaatgggtaatatgagaaaggatatggaggcctgaaggaagaacaagtgtgtcccgaatgtctataaagatatcaaaagcgggtatggagagttcgagaaaagatatggaaggttggaagcagcgtatggagacctgggtgaatgatatggacgtctcgaagctcgggggtttggactggaatggaggctatggagaaggaatttgatttaatcgacagagatatttctggcagcgaagctcgtgcttaagggccagagcaagataatattgtgcggcactaggggaggttacattgtccattttgacaaaggcacgctaattgattttctatctattattactccgtactatcgcagtactgaaaggattccaaattggccggctgattctactccgaatgtgccccgggctgacagcttacatacaggatgtggaatggaatgtggaacttccgtggaagcgtgagtttcttcaatgagattatcatgttcaggatgcctatgttataggcgttcttctataagatccgaaagaaccaatgggaacaagaagatttaagttagagctgcagttagcgtaccgattaggctaaaataggaaaacccaaaccaactaaagacaacatgcatctgtaggtacacatcaaaataaaataataagccaggtacaacggaaattgagccatcaacccgattgaaccacgggacgctgtaagctttgcgggcccggtgattgctctgtttgttgccccacgttcggtcgaatggagcccggggagcttgcaaaatattgccttggacttcccccacactttcgatttcctctctctccgcatttcataactaaactacacacccattatggtcgaactcatcaacccgcccgagactcgcgaactactccctcccctcctcgcatgcctccccctggcctttgtctcaccccgcgcacccccagctctgttaccacttctctcccctatcctgcgccaacgagtcggggttctcagttcgctatccacatcttccaccgagtcatggctgcaacttctgtgctgggaggctgggaaagcagagcgtctgcagagggtcattgacggtgccaccttcgaaccacaccccgtatcgggcgaaatcgagcttccggatgaacttccggtcacatacaaacggatcgacgatgagactctcaaagcacaagttccgctcgccgaatacagcttgacggtggtctatttgtggtgcccgacagacgaggagggaggtggtcgtggctggcgagtcgcagagcttttgccgcgggagggagctgccgaggatgacgataaatgggcttcttctatctgggaagcaaacgttcaggcaaaggaccagctcctgactgatatattaaaggctgccgaggaagagaaatccccggagaacagcatggagaacgacgacgacgacgacgatgactactgggctcagtacgactccacacccggagccaagacacccgcaccgcctgctgcttcatcaaagccgggtccatctcacttgtctgagcagtcatatttctcgcagtatggcgacgtgcagccagccatggataatcatgatcccacggaggagcaacccgaggttggtccatcatcgctcaacggagatatgctggccaatctcttgcgacgacaggtgaacggagtcaattcagatgacgagccccgcaagaacggatatgccccagaccatatccccagtgataaggctgcgcaagatttgaaccacccacggccggcctctgcatcttccggtagctctgatgctatcgctaagctggaacacgaggcagagagccggtccacctgcgaggtcggagtgaaacaacatatcggtacgagcatcaagagtttgttccgtttggcaaaggtcactggaatgtcccggggggagttccaggcattggtttcgatggaattggagcttttggatattacggatgacgattaaggctaaaatacttgagtgatacccatgaatcataattttgcatatgttggccataaacatcattgggagtgaatggtttgctttgggcatctgatattgttttaaatacataaaccacaatgaacaactccacactaccttaaatcctgcacaggtgacgccatctcgcattgcatgcccgattaggcgtagcgcatcccaaaaaccaaccttcgagagaccatggatgctgcctaaatcgatgtacatcgtatcgttctaaccaattcaagcaattggaataaaccttggaaatgtcttaggctgagctcaccccgccctcaaacttaaataagagttggcccccataagacgtttacgagaagaaccagcttatttctctttcactcatacacaatgcacgatcaaaagaaccagaatccatccgaggacagaggacgctatcatgaggaagaggcagcagatcagcctccagcatacatagcaggacccgcaatacaaccaagccgatcaccagcacaagcccctcatcaaacaagccacaaaccaatcgcaatcccagccatcacctcgtcctctgattctcctttcatccgtgcatatgcacccattctaagaaaccaccaacttcccaaggaatcgtttctcagcttcctcgaccaactgaacaaagacatagctgccagtccgcccctccaagtcctagatgcaacgggcgggatcttgaagtcggtcccgatattattcccgttgcactggattggcggtgtggtcagcggactcgcaaacatgggcagccaaggcatgtccaaaagccgaacggactcctccatcaaacaagcgaatagggacatattccgtccgcgcggcttggaggttgaaattgcgaaactggatgccctggcacatgtcgcaaagctccctatattggattctcaaggcaaaatcgatcgacaggcgcctctgtttctacaactccaggatggggtgtccatggcgaaccctgggaccgatgaaaggcagcaacaggaacttgatttgcagcagaggatatcgactttgcagccctggattgctgagcttgaatttgatatcttaccttggtcttccaagtctagattgacccggttcaacgcctcgttgaagaagtataatgagccggaatatcaggagaagagaggcatgggtaggcgaggcgatgtttacatccaagagacaccacaggaagaggctccttttaggaaggctttgtggcttgttattcgggaggttgagacggatgaaagacgttaatatgtgaatatatatatatgtgcagttcaccgtctatattagacttggctgaacttgacaaggggcaaacaggaagattctttgtcaactagcaatagtaattttaacgagaataccagaactttaatgcatatatatctgtccaattagatgccagaccaaccaacgaaaaggtggtcaaaggaaatatcacatgtagccattgcgtcgtcatgaaaagactgatagcacaccacacttgtaactcccaagggtcaatttcttgtatgtaacctgtactcgactctcaaacaaggagttggtgctcaaagtacactttttgtggatttgtatacgtagatcccgcctggggccaccgccctgccccgaaactaaccttggaagaagacacgcaacgttctactgtcatccccctctacatctcctttcctttctcatagtttacttggcctcaattgttgggtgccatgcttatttggtgattctagtaagcttccttttcctctctattacaatttttttctgctttgttgatgtttactgacaactaccgaagtctatttggctataggtagtttctcggtcgctctctacatttcatattttcaacatgtcgtccccttcgccctctctgcggaagagaggcggaaaaaaggatgtttacaccgcattgccctctgaggatggcccggcccccgtgtcggtgccggtcaaacagaagtcggaatgggactattggctggccatagtgattcttaccctcctggcttttgcgacacggttctaccgcctcgatttccctaacgaggttgtctttgatgaggttcacttcggcaaggtatgaagtcgaataccttttgtagcggcacaatttatgaaaaagggggccctttgactgacattgaaattactcggccagttcgcttcttattaccttcaacgtacctatttcttcgatgtgcacccgccttttggaaagctgttgtttgcccttatgggttggcttgtgggctttgatggaagattcctgttcgagaacatcggcgactcttacatcgacaataatgtgccctacctctccctccgtgccatgccggctactctcggcgccttgacaattccggtggtgttcctcatcatgtgggagtctggatactctctgccagcctgtgtgctggctgccggtctgatggtgtttgacaacgctcacgttggagaggaccgcctgatccttttggactcgaccctcgtgctgtcgatggcgctcagtattttgtgctacgtccgtttctacaaattgcgtcaccaacctttcagccggaagtggtggaaatggcttctcctgaccggcttctgcatgagctgtgtcatctctaccaaatacgttggtttcttcactttcgtgaccatcggcgccgcagttctcgttgacttgtggaacctcttggatatcaaccgcgagcagggagcactgagcatgatcagctggggcaagcatttcatggctcgcgctgttggattggtcattattcctttcatgttctacttgttttggttccaggttcacttcgctattctcaaccggtccggccccggcgacgacttcatgacacccgagttccaggagactcttagtgacaatcagatgaccgctcagtccgtcggaatccaatacttcgacaccattactatgcgccacaaggacactaaggtcttcctccacagtcactgggacaagtaccccctgcgttacgacgatggccgtatctctagccagggccagcaggtcaccggttatccccacaacgacaccaacaaccagtggcagattctgccggccgatcctctgattgatccatccgagtccaagagcgtgcgcaacggcgacatcatccagctccgccacgttggaaccgagagttatctcttgactcacgatgttgcgtctccattattccccaccaaccaggagttcactacagtctctcaggaactggctgagggcgagcgccacaacgataccctgttcgagctcaagatcgagtcaggcaaggctgcccaggagttccgtactcttgccagcctgttcaagttgatccacgttccaactcgggttgctttgtggacacacacaactcccctgccagaatggggttacaagcaggccgaaattaacggtaacaagaatatcctccaatccagcaacgcgtggtacgttgagaacattgagaacttggaagaggatagtcctcgtcttgttaaggaggagcgtaaggtcaagacactgcctttcttacgcaagtactttgagctgcagggtgccatgttccaccacaacaacgctctgaccagcagccacccctatgccaccgagcccttccagtggccgttcctgttgcgaggcgtgagcttctggactaagaacgatacccgtgagcagatttacttcttgggtaaccccattggatggtggattgctagcagtattctggccgtgtttgccggcattgttggtgctgaccagctctcgcttcgccgtggtgttgatgcattggaagaaagtgagtcgaaaaaccaaacatcctgctcttatccctttttttggttctggcaattaacacacgttcattagtttggggtcccggtacgcgctcgcgtctgtacaacagcaccgggtttttgttcctgtgctgggctgcgcactacttccccttctggctgatgggtcgccaacgcttcctacatcactacctgccctcccacctggcctccacaatggtttgtggcgcactggttgaattcattttcaacctgcagccgctcgatccccgaactgcacttcctcctgtcgatgatccctcgggcaagtccaaggcacggtcggtcagcagcctgcgtcggttcatcacggccaaggaacgcatgggctgcaagtcgctcatcgcgggctggattgccactctcatcattctggctgccaccatctggggcttcatcttctatgcgcccttgacctacggtacccccggcctcgatgtggccggtgtcaatgcgcgcaagtggctcaactacgacctgcactttgccaaataagctcgtcgctgggccaaggaggcccaatccgcgagacaatacccattcgagacgatgggccgaactgaaatttcaaattcacaatttttgtaagataacttataatccgtgataaaaggcgggtagagagaatgtgtttttttttttttttttgcgcgatgggaggattgatatcagtcgttggtatcatttgaaaccatggtgtatgtgcatgtatgtgtggccatttgagtcctctttttctccatcttgatgtagtacatattcaatgtcccatgttcagaatttctcagtcgagtcctgtgtcacaattggtggcacgggattatcagccgaccgtgcaaactagtctgcgatcgttgatccagccttgttatattagggttcgagatatagataggtacggagtacgcggagtagataggagtcgatgcaagaagaatgtgccaatgtcgatcgagatcgacttcacgtgatcgacgatcggtgacatgtgcgcatcgcattggagcagatgagatttcatcgttggatactccgtccttgacgagctggcctgacgacgttgttctttttattcaaaaggttatatgaatgtcttatgtatcttgcagatgcctaggcctaacccttttctcttcccacattccaattcatttgcctttttataaattggggttatttttagaccgcgaaaaaaaaacagcccactgtttatgtacaaagggacctcctactcgctatgtatagcaaacggtttcacattgtcctatgagatcatgacagtagccgagttttaggatcctaaataataacccacgatagtaatatagtaatctagtaatacgccataataccaacggagtcgaatgtcaataatagtcctaatacggaatcctcctcagcccatatctggacactacggataccaaagggactaggctgtcagtagcgtcttgtcttttttgcctcgctttctacgcattctctctctcttttctttcttttctttttcattctttactccctagtggtttcttagggtctctccactccccgcgtctccagatctcattggtgttttctttgagcgagctgaaacggacatttcttcgtctcacccgatacttatggtgggttcggattctttccagaaaaaaaaaagagcacatattcaaggcccgcaaggaatttgggagtaattattcaattcgttgtgagatgctatcggatcggacagacacaagacaacccactctgtggattcctgccgggcctttgatcggccgctagaacaaacccatgttgtgcttcgtctctccctgaaagcttctgactgacttcaattcttctccagcttatcccctaagctcagcttgcctttgttttccctcggtcaatcgttatacctatctatcggactgatcgcttcttcgggtatcacttggattcgacacatcaccctcaaagggcgacacacccccccaggatagtccaaagcttgatgagatagctgactcggaaaggcgcactggccggttcttcaattatcagcccgatctttcagaacagttgcttccatccctatgaaactgcccaagagctttaccaggcggaaatcgtccggcaacgttctagaggaggtggaatctcctcaccaatcctcctttcgagtctttgagcgcccggggcctcatcgatccatgacggatggagcagccctgaccaagccgctgagtgagggcaacacggtgccgatgacggaggattctgataacatctttgcggagagggagcgacccctggacaagagccggtacgatcgtccctcgaccatggattctctcaggagacggctgactgggaaccgtgatagtggtaattacgaaagctctacgtcaactaggctaagctcatcatccaccctcccatcgtccaccgaggtcccgccgcccgaggagaccttatccccgcattccagaatccatgatgttccagctcccccacccctcacgagtgcgctgcgtgccgcaggacggaccttctcgttcggtggtcgattcagcaggtcaggaccacaagtgcctcggcaacaaacaccagatgccgcgaagaatcgcccggtgacgggcagcaccgacagcacggccactccacccaagctgcccgatacagacttcgctctcggctcgcaggatgacttcaacaagatgtttgataacctgggtgctcgagagggttcggcaatacgggggtcatcccctaatccgggcaaggtaagagctgcaatcgctcgtccaggaaaggatgcagtgctgacagaatcgcagtattcctcgtctcccccgagtcatgttctgtccgggtttcaaaacagcagagctgccgcacccgctgcgattaatacagaccgatcgactactattgagtcacccccttactcctgggatcgtcgcccatccgaggagggcctgctacgtggcccgcgttctccgccgctgaatcagagccagtctaccctcgatacagttgttggtttccggaagttttcgccgtctcccaatcagtttgccgaggctactacttcacatcgttccttagagcgcccccagggatcggaaaggagaggactgcggaggagtgggatatattcggccaaggaagaatccggatctttcgacgacgaagatgccaaaatggttcgacagtctgtcttgttcagcaaagaaagcacgccaccttgggctgagggtagcccctccggtggaaccccattgatcgataagggcaaagcacctaattactctggccaagtgaacccagaacccgataatatgttccaataccgccgttcgcccgctccggccgagagattggacccctccattgcggatcatgcacggttggctgtgcagtatgcggatagtctccccaagtcatcctcgccgggtaacaaggtgatgactccatctcagttcgagcactatcgccagcaacaggaacttcgacgttctaatagcaatgcgactaagagcgatgatgagtccgaccatgacgactttgacgacgaacaagatgaggtggagaagcaacgggagacggaacgccaacgacgaaggcaggaggctcatctctctgtgtatcgtcagcagatgatgaagatcaccggccagcaagcacccgtgcaatcgctacgcccggtgatgagtggagctagcaacagcacgcccaacttgctccccagtcgcctgtctgcactaggcgagaagtccaccagtgggaagagcagcgaggaagaggatgacgatgtgccgcttggtattctggccgcacacggtttccctggtcaaaaccgcccgccaacccgcctgaacaacgtcagctccaaccccaaccttcgtgcatccatgcaaccgccatatatatcatcttccaactctgtttcaggtgccgatccgaacggcagccgaggcagtctgccaccttttgcaaggaacttgccacgagatccttacttcggtgcaggtttggttaacaacgccaaccgtgaatcgttggcgttcggaggtggttcggtatatgggggatcgtcgtcccccgcacctccccctggaggtcttgtcggtgttatagcaaatgaggagcgggcacgggccttgcgcagaggaagcccgaatacacaagcaatgcatgaaatgggaggggtgcctcggccatactcgacaatgccgccgccgcagcagcaaaacgttaccgccggggaacaagcttctatccagctgtcgcagcagatggccaacatgatgcagatgcaaatgcagtggatgcagcaagtgatgcaaatgcaaggtgggcaaggtcaacctatgatgcaaggcatgcctcctatgatgatgcctggcggagcaatgtccatgcctcccatgggccctccttctatatcgggaccccagtccatggctggcaatccgaacttccggccgatgtccatgcccgcaacatcctttctcaatatgccgccctcgcttccaccccaagtcgatcagcgcacgatgagcatgctggaccccaacgtttcagcccgtaggaccggctcgcctatgccgaatctgtccggcaattccttccggcccaacaccggatatgcggcttcaatcgctccgtcggagcgcagtaccgcgggcatggcgcctcgttaccggccagtatcagtcatgcagcccgaatctaattacgcggtggcatccccaacaaacaaacctttcggtgacgaaaaccacaacccgtccatgccgatgcctcagtctcacattccgaaatcgcatctcgcaactgtaaccgtccgccctgtttcacgggaaaatcaaaagcccggttctgaggacgaagatgacgatgacgaggcctgggctgacatggcgaagaaacgtgaaaaaaagaagagcagctggaagatgaagcgagggacatcctcgttcggggatctgctgagcgccgtgcactgagtccctgattccgtttcctctctttctttctttattcctcaactcgaccacgaaagcgtgcttgcattgcatttgaaaagaactccgtctgtgctacgctgtataaactgtccctttattctctgcatctccatgcccgcttccgtttcctaatatcctccgcttcctctacaacatgacatatgacgcacataccatcaactcagagaagggcttgccgtgccatttggatatgccggctcgataatgcatccccagccctcacctcacatcttgtttgtcactcctcgctcccgggcccgggtttccttgtatcatcttgtcatggtcattccggtctgggcagagagatttggcatttacaagtatgaatacatatgctttccttgtgcttttactctagtttcgatttttgagctcggtcttctgcgttcctttctcgctttctcatgatatcggcacgggaagagacatggcgttatttatctgataggtttctatctttgtgctttctcatcttgtattctgtctgttttgcattgtctattcgccagagcgacttccttaatatatttcaggtcttgtggccattatctcggctctttccaaggttcctttttccttctttctttcttctgtttaggttttgtgttttctacctcaatggagatgtatatctaacgatagcgtagatctgggtcgagataaggaagggatctccatacactaggtagttacggctaatatatgttatgttatctcatatcaagatgatcgattgcgtgcgtatagcttagaagttacgtcgtgtgaatggtgtccaagcatgaatttggcttggtttagtaggctacatgtctcggaatcccgaggcttattaaaattcattggaaaaatcgtggaagaacatagggtttgaaggaactaacactagtgtatcttgaagtgagatgaagataaagtcaatatgtatacagtcatgtgacatcatataagagagcggtcacatgatccatatcgatatcgatatcgaccacgatatcttcatcactcaacgtcaaaatttgagcaagcagacagcagggcctgaaaaaacggtttaaagtatagatctccattgagatcctttgtcgggattttttcgctattgataagcaccctcaatagcgtattccgaagtcacacgccattgatcgctattgtcttgtgattccctattgtcttcagaggtcaatacggaactacttctcgtctataattaagccttgaaactacacccagccttcaacctctcaccaatctctctcttctgaaactgcacaaattcttcgatacatacataaaatcatatcatccataccgatataggtatcttccaaggttgccctcaaaccctccggctttttaaaaacagctttctcgccacaatgaatgctccagatcggtgagtgcagattctcttttgcaatccccaaagtcttgttcatttccagctgctctggtgaatttggttgttggatgtcatatgtactacagagcatatttcctagattctgggttaaattgtgccttccttttttcatatcttgtcaatcagggaaggagctatggacatggatagccaggatggcactttcctcgcaccgctcttgccctggcaatcatttcatcttgcctatttataccgtctcctcggtcaacacatcttccctctttcatcctcttgtttacccgtggactgtgatcctgttttacactgtcgccctcttttttactgtgtatccctgtttcatcgttctgttttgtgcagccatgcagggccctggatttatcacggccactgcggctatcgccagagagtgtgctggtcgccgtggtcgcggtcgccactcgcgtcaccctcgccctcagaaccccagcgatgcccctgatgtgtcagtgtcattagctctcggattaaggcctttgcttcattctgattttgaccttcttctgcattctcatcttgctttttcatctgtggaccataaactgaccaagctcatgaatatagttatgaagccatcctgctcgctcctggcgaaagcaagattgatgttgaggtcgacacccgtaagtcatgctggtcagtgtacacgacacaacctcactaaccatctctctctaggcctcccttctgctgccatattcaccttccgcaaggaagaccacacccttggcaacatgctgcgtcaccgtctcctcaagactgcccatgtgatctttgctgcctaccgcgtaagcaacctgctctatgtgcatggtgtttcttcttggaagatactaacaacaatccattaggtccctcacccgctcacccccgagttccagctgcgtatccagactgatggtgaggtcactcctcgtcaggctgtcattaacgcctccgaggctctgatcaaggacctgggcatcctgtctcgagagttcaccaaggagttcgagcttcgcaaggctgccaacgccgccaatcagcaacagcagcaaagcaccgctgagtaaatggttatgagtgacacccagctatcatccatcttgttttaactggtctgaaaatctggcgcatggagcagtcatggtgttttatgccttgcgtttgctttcttttcgttttcaatctttaagggtggctcctttttgcgcgggcatgtttctttttttcaataccatcagctatttgctacccacaaatctacaaatttacaagcttgaagctctaatcatcacttgtatccatcaaccaattattccagttgtagatccaaaaatatctcgaatgactaagcaccagatgaggttagcgtaggtgcctccgcgtccagcagcggcgtcattcgcatcctcctgagactcaactcacttagaattttgcattcgtcaatttcttttggcttttctgcatctatttggctcatgcgagcgtggtgtctgtgatgttttcctcgtcgaataatttcctcgggggtggtgccagtggcggccaggcaccattcatgcaacagcaacaacaacccccctattcacaattccctcaaggccagatgtcgccatcagtccaaccccaaccgactggatttcctctgcagcctactggtctcgctccacagccgaccggattcgccggccagccctccccgttcggtaactcgcagctacagcctcaagccaccggattccccgcaggacagctccagccgcaattcactggctttcccggcgccgcgccccagcaacctcagcagcagcaagcgcaaagcttccaaacacaatacactggataccctccccagaaccaagcgcagcagccgcctccggtgccgcagataccaactcgattcaagacctccagcgatatcgcgaactccttccaagatgccgctggctctggggcgccccctcaggtgccgccaaagacaggatcaaagatcccaaacattcggctttcttttatcacggcacaggaccaggcgaggttcgagcagctctttaagtctgcggttggcgatagcaagacaatggatggtttgtccccgcgcactcaatatatgatatggcttgtatacagtactgactggtcacaataggcgacaaagcaagagatctattgttacggtccaagttgacaggcggtgatctttctaagatctgggttttgtctgatacgaccaaatctggacagttgttcttccccgaatttgcattggccatgtacctctgtaatattcgtatcaccggccgcgagctcccttcttccctacccgagacggtcaagaatgaggtttctagtatggttgacatcatctcgttcgatgtccccgacacacagccggcggtccaacagcggacaaacgtccccaactttgatgcacctctcatggagaacaagtcgacgcccccaattgttcagcaacctgtcccgcaacaacccaacaacgcccagctcctatcgcagctgacagcacagcctactggattctttccccagcagacgggtatacagcaggctaacccgactggcttccctggccagaatcagcctcaattccttcagcctcaacaaaccggtttcatgacgaatccacaggccacgggatatactggccctcggcctccgatgccgccaatgcctactggttacggctcgaacctcagccctgctcagaccggtgggatgcaaggcctgggtgtgcagcctacgggtctggtaccgcaacctacgggtataccaggtcaatggggattcatcaacacaccatcgcaaggtttgcccaatatcgaggctatgaagcagcaactcatgccgcagcctgggcgtgagggtggtttcagtgctgttggtctttcgggaaatgctacagttgcctgggcaattacgaaggaggagaagaagatttacgatgatcttttccgtgcatgggacggtttccgcaagggtttcatcagtggcgagactgccatcgagatcatgggccaaagtggtctgaatagaaaagatctggaacggatctggaccctggctgatccccacaaccgcgggcggctgaacatggatgagttcgccgtggctatgcacatgatctaccgtgctctgaacggatacccagttcctagccgtctaccacccgagcttgttcctccttctacaagacacttgaatgactctatcggtacagtcaagtatctcctatcccaggatgctgaaaaccgcaaggctacaggcgcgttcctgcagccacagaagaccggtgtcagctatcttaaagatcattccttccgtggtggtgcagcaggctcttctggggccagtcgcaaggatgcgacggttttcaagaataatgactccgctggtggataccgctctagtgcacgccgtcgcgtggctaacgaggctcgtaccccgtcaccggctgcatctggcgcatccgaggaggagtactctgtggaacagctgaaaaagaagatccacgaggccaaggtcatgattgatgctgccgacttccaggatgagaaccgagccgaggatgatgacgctctagaccgccaggatcgccgcgaggcagagagtctcatggaccgtatccgtcgtgtacaggacgatctcgatactcaccccaacgcctcattccgtcaagtggacagcggagcagatcgaagggctcttcgtcgccagctacagtcttttgaagatcaagttcctcaggttgcatctgatgtgcgtcgtctcgagcgtgaaatcgcggacgcgaggcttgagctcttccgtctcaaggacgccaaggcacaccccggtggtgcttctaatatcattggtactggccctggtggcactgtgactgaggcagatcgcatcaaggctcgcgcgcgtgcgcgtatgcaagcgcgggctgccgagctttctgggcgtcccgcacccgcaacggaagatgacgatggccaagcggctcgtcgtttagagtccgagagcaataccgtgaagatggagcgggagcgcaacgacactatgactcgtgatgtcgaagaaagtgttcgtgatttcgctcgcagtttggaggacagtcttcgggacgagggccaaaactccacacgtgagcatgagaagcgtcgttgggaagatgcattgggagttgaagacgtcatccgcgacttcatctatgacctgagccgcaatgcgcgaacagcaaatgttcgcaaagaagagtatgttattcttatcagtcaggaaaagtattcaacgctgacagattatagacgagagagaccttccccagatgcgcattctcgagcatccccagcggccgaatctgctgctgcgcgcccttcgatgcccacatccgtgcactcgtcaagctctcttcctggtaacacacatgaagatcgtgtcgcggctgctcgggagcgtgcacagaagcgcattgctgagcgcatggcagctgctggtctgaagccaaatgactccactgagactcttgcgcaacgccaggagcgtgagaagaaggagcgcgaagatcgtgtcagacgcgccgaggaagaggatgctaaacgggaagaggagagacagcgtcgcttggccgaggaacgaggtgttcctagtgatgcagccccgaaggctgcgggcaagaaacccccaccggcgccgcccacccgcagggctcggacggatagtgccggccaagccgatgctaagaaggcagaggaatccgctaaaatggagcaggctgcccgcgagcaggccattaaggaagaacaagaggtgcaggaagccgagactaagcgtctagagtgagtaatctacagccggtagagacaaaatgagcggttttggctaatacatttacaggagtgaggcaagccaaggggagttggatttccaacgcgagaaggatgctcaggctgctcgacttcgtgctctcgaggaacaagtccgccaaggcaagattaagaagcaggaagagaagcgccgccgggaagaggctagccgacaggccaaagagcaggaagccattcttgcagcccagcgcgttgaactggaggcggccaaggaacgtgagctacagctgcagcgcgaactcgagggacttgacgagtcatcgtccgatgacgaaggccctgccgatattacgcctcagtacagcaccccgacgcagagccagaccctccctaccccgcctcctgtgcccacaatagctattcctgagcctcctgcccccgcgatagctattcctgagcctcctgtccccacgatagctattcctgaaccacctgtccccgaaagcgtgcctagcgagattggctcccccgaaagcagccgtggtgttcctgggctcacgcccgacgctgagtccaaaaacccgtatttcaagaacaagagccaaccatccgaccccatccaagcgacctcgccacctgccacagctcagtctacgaatcccttccaccgcttcgtccagcaagaacctatcaagcccaccttcactggcgcagcccccctggaacgtaagactcgtgctcgcccggaggaagacgacgactggtccgctgcgggctctgacttcgattcatctgatgatgaggatgaccgcccaaccggcggcagcgccaaacaacttgctagcatcctgttcggcactatggcacccccacgtcctctgagtgccatggacgacgacaaatctgcctcgaaatctgctaccccggtacaagaaagtccaattgcacctccgcccccacccccagcaactctgcctcctcttcctgctatcccaagccctggcgatgccgtatccccatcacccgcgccatctgcaggagctccacctccacctccacctccgcctcctcccccaggagctggtgctccttctatggccccgcccccgcctcctggcggagccccctctgctcccccgccaccaccgccagctggcatcccacctccacctgctccccccccccccgccgnnnnnnnnnnnnnnnnnnnnnnnnnnnnnnnnnnnnnnnnnnnnnnnnnnnnnnnnnnnnnnnnnnnnnnnnnnnnnnnnnnnnnnnnnnnnnnnnnnnnnnnnnnnnnnnnnnnnnnnnnnnnnnnnnnnnnnnnnnnnnnnnnnnnnnnnnnnnnnnnnnnnnnntgcccccccggccgcggccggtggcgctggagctggccgaggcgccctccttgcgtctatccagcaaggcaggaccctaaagaagactcaagtgaatgatcgtagcacaagctcgtcggcaggacgcgtgctgtgaagagggaattggaaagtctttatttttattttgagagtacatactgtacagtggcgaggggaaagacatggccgtacctacatgattggggagtaaggtgacgaggtctatggataatggtagtgtagtaagcgagtagttagctgcgtttttgtactcttcttggaatactcatcgattttgtttattatcatcatttggcctaacattggaagcaatctgtctataagcgccgcaaatcgcgttcattctaggggttgttcacccgaatccttcaacatatccgactgattaagtactccaaagatagtcccggaggtactctagtctatctagccttctgttttggattttcctttcctagttgttgggatttatgtatagggaagttgttccttgtcgactgcctcaacatctctaccctctatatcactatcatattcaaatacatttcattcgcttgtattgatttagaaccccggcaccgatactctaagatagaggccgtacactctgctggttatggaaaacatcatccgggtttaccgcagccttgacttgacctatagcaccggccactaagccatgtagactcaatacatagacctcgatgaatcttacatttagaaatggcaaacacgccaagattggccaattgaagcatattataattccatattcattactttctttccacgggtcttcgaaatttgataacgacccccattgttaattaacatgtatctatcaaagtgaactaggtcactttttaatcatctcgtttcccctgctttcgtaatcgtaaatcggagtagcgaaacggaggcataggcgcatatgtagacttcattgaatctggaaattcattgggactgctgtggcttatggaagagcccccttcatgaatctccctgtttccatcgccgtagtcatgaaacacaagtatctcttgcacattttcttctccaaccggtgcatctgcttctgaattggagccaggttgtgatggcccagaaatatctgttcgtgtccttgacagaggtgacacaaaagtctttctcgattttatggaagacttcttttctgatgatggggtggatgtgcgagctgaagagtccagaatgtcttcatttatcaaactctgagcctcagaaagggggttttgcttgatctgatttatggtgacgaccatcgattttgtattcacgaccaactttggctgagtgctggtaccggagaattcactcattctctcagacaatcgtcgcagacatctctcttgacgatttatcacccgcctgagctgtttcctagagtagaattagactatatcactctgtattcgttgcgaaaacatgggtctcacatttgcatcttgagagatttcatttcgctttttgagacagatggtttcttcatttctctcaaacggaaatcgagaatgagcagacagttaagcgctgttagcgtcattttgaaactggccagcgtgataaggggaagctggacctcatccttcatccagtgccaccgaagctttgcgataagctgttcaaatcgactagcattgctttgttttcttaaaggcccaagcttcagaaaaatttcaccgatttgtccaaaagcgaaagtggcttgggaattgagagtctcttccagcttttgctggcgagcgagtttcatgaccctgttgtccagagggccactaatatggctgaatatcccaaacaggctcttgcaagcggatacctcatctgcgagaagattgacctcttgcttggcgaattggaaggtatgcttgaggcggtgcaatcgtttaccacatttctctagctggttatagatcgcgaatattgatgataccgctccaatggcttccattgcgaatattgccttccttcagtcagcacacaaagccattattatactttaaatacctaagctgaggggtaatgaggctcaacgctgatgacagaagaaccgtgagaggattcagtgagcctatcagagtaaaacacgacgttcctacatatatagtgccgtagtttgcatcacatcatgtctgtgcgcatatattggttgtgcatactacgagtagattatcactctccaatcaatcagcttattcacattgattaagagtccttagggctcgaaaccaaggtctaactgtgactctgtgttagagagaaccgctacgtaccaactcaaacccattgaatgggagcggctctccatgaacgcgaagttgaaagctgcgcattatacgctaatgtgaatatgattacagttcgtaacatgtttgtttgtttgttttcttgggagagggagggggatagtgagactcgatgctgcgttagtagaggagccaacgataagagggcccgaggagcctatcaaagtacaacacgatgttcctacatgcatagtgccgcagcttggatcacaccatgcccatgcccaacgaacggagccgctgcataacaccaaccaagcaaggtgtttacggtagctgtgccacgccaaggggtaatcgttgttcaagctgtaagttctatttgaactaatcattttcaccaaagactgcgagcagtgatcacgaaagagggcagcatgagataaaaaaaaacaatcaagtccgtatgttcagcagtgtccctggacatttgagaccctcgcagccaggatcacgggtaagccttgccctagtttgaatggcagtgggtgtggtttgatggtggagggtctttgggagttccttccaatgaccctttcaaagattttgattttgactttgacaatttcatattcgggcctgaggacttcggagaagggctggcttagtggagaagttatctggtaagactggcgggacaccctcttgccctacgtgatgtggtctgaaataaattgtgactacctgctacggcagtcttcaaccaactcattttgcccgcagtaaaatacacaatacatacaactatacacactagtatcaggtatagtcgattggcagggtctgtgcatgtagccattggccaatgaccatgcttgcgttgtttgagaagtttgcaagacgtctcgcctcgatcttcagctcccccgcaatgtccccagatccacctgggttttttgacccacgctgctgacatgcacacttgtgacgtccattacaactgcgcctaaggagctatcggtatagcttttgagaacgagattgaggagctggttggcgaaagtcaccaaccgaaagctacagggaaatgatacggacacactattgtctacaaaataggcagctacccctctctagcatcattcaccaatatgttcgccctatcgcccaatcaccacggtctagcaggcattcctaactacctactaatatctgccaaactgcattcattctgcgctttattcttggcttggacagaagctatcgtcttcgccctttttcatctgctcgaacgccggtattcttcaatatgagtatcgaaaaccaggaatactcagttgatcaagagattatttctttctttcaaaagacttccaccgaccgctcgtcctgtgatgatcgagcacggacacttgtcggaggcactgtgacccccgttgcagtgcaaggcgcttgcagttattctgtatatgcaggtctagagtatgtggttcagttccgactaaggtctcttgggctgaagacagaaattacaaatattgcccgcaatgtatatgggaccctagtgccctccgtctcttatcacggtcagattgggagagatgatgtcagtgggaaggaatctctctttgtctatgtgatgagtcgggtggaaggcattagccatctcgattttatccttgcgcataacctcccagagaattcgccagagtactttacctggagagagaatctggtcttcgacattgctaggtatgtttagagtgagtgggctatattattgataatgatctaacccgaaaggttctttgctctcacatggaaaaacccgcagaatgtcgaccgatccttttgtgaaaacctcgatcaaagatatgacgaagacctacggcggctcttagctgctctacctgatcgcttccacccaatcatccaacaatcgattgacgctctacctgctatattttcgctgtctatggtccttcttcacatggattttggtaatgtgcaatatcatggttgataccgacaataaccatctggtcggaattatcgactgggccgaagcagagattggtcccttcggaacgaacctccattctctccagcagttcatgagcaaatatcgccttggtgttggctggattcgatatggtagctatgacactttgaacaacttttggaatatcctttccgcagacactcggggtctcgagaaggagacaatccgaacaataaaatctgcaatgattgtgggccttttgctttcccatggatttacaagccgccttgccaacatgccgaagcctgagcccatccgcgacgacaaaagcggagcttacaaaatgcttggtttggatggtttacttatcgttcctgctacgagtattgtgaattagaggtttttagtgacaagcggccatatgttgggatttgaaatgaacgagtgaataagctatctagtagtgagccaacccgtaagtcatggagaatatctgtacatactatgtattgggttagattgagtgatacttatcagggtgttcccgtctggagccatggaagtggagatgagtaccccaactaggcacggagttggaaggagtacggagtgtaagctgtttggttggcttggcataactactggccagagcaattctcagtgggggaagttgtgactattagatggcgcttgctttaggtaaacacgcgttatgaagttattcaaccttggaagaggctggggaatatgtagtaattcagctaaaataaggcattctggcatcacaatccccctaaaggagatcttgaactctcggaattgtaagctgcaataggatacaccccaagctatgagacgccagtaaaaccaaatgtataagctgttgtatacagaatctcggagttgagtgaggatgcatttcgtatatcatagctctttcataattatttcgcatacacaaagactatactattggcatgcgataagctgtacaaactggaacgcagaaagaaaaacaccgacacaatgactgaccaataccaactccaaaccaaaccaacataaccgctagaccaataagtcgcattcttaattggtgcgtacatcttccaacactaattcacaagacaacttccgcaatcacattgcctagggtactcacacaccatacagcgacaagaccccacccaatccggcgatccattctccaattgttcaaaggaacaacaatcaagagcccaactaggatgaccagaagcgtcgcgccgctgataacaagcaccttggagatggcgatatcatagggggcctgcacaggagcgataccttgcagcccctcattgtgtctctggttcccgccattgatggtcatatacagaccaccaagaccgatacccaggaggatgttgagcattggtccaccgaagcaggcgctcaaagccatgaccggatatccgagtcgggcgactgtgatatcagcgactagatcgcctagcgagtttccgacggcgaagatggtcaatccaagtagggaatcagagatgttgaggataactccgatggttttgaggagagacacaacttctgtagcgatcgtcgcgatccaggatatggcgactaggaagccaagtagggagaggaagggccgccattgcggtgggaggctgaggatgtcggtttgggatgtacgcgggaggaaagggatggaaagatcttcactgggacgtcggtggtttcgttgacggcgagtgcttatgatcagggctgtgagacagacggaagagaataagagggagacaagggaggggaggatgaggttgcgcagccgacgatcttcgtccacggtcgtccaggtgatgagcacggcgaagaagggacctgtgaaaagctggatggaaaccagccagcgattccagtcctttgttggtacaggatgcgcagaaggtgaagctggcctcggcactgccgggagttccgagtcccatcgcgggcgaccagtgtgttcatgaaaggactttcgatggtggtgcgttggcggcgcattagaagctgacccggcgtagtcatgtgcctgggccataatcactggactatcggctggaagtctaacccttggggagggatggtctacatcgctgacgtcctgaataatcaccgagggtatgggatccagttccaccgactctggtgcctctggctcgatgacggggaccgttatggtaagaagcagcacactaggagctgcgataataccgagcagtcgttcccaaacatttttagacttccagcccgccagggtcgggaagagcgtgcaaccaatctgctggggaggggggatcgagtcaggccaccaattcctcaggtatttgggaaaagggaggcctacatgagcgaaatcgtcatacccatcgtgaacttgtagcagttctaactgactagctgaatttggaagtcgaatgctgggtggtcgtgagaattccatggagggtatatcagtatacaatgggaagggcactgaagggctttctaacccaaagcctgaatgacggcgcgtcgtattgcccctgggagatactgacattggggaccgttcatttatccccccattgttgtaattgggggaattaaaaacgtctgatggggcgagccggtcaggagtttgaggacttggcgaccgattcgcacgcgacacatccagcgccatcccagtatcaatttgagggagatggcgcgaccgcatggcttcttgtcccgaagtatcctcaaaagaaggtctgctcactgtaagcagtggaccctgtgttggtcggggctccaaaacactggagtcaattttcaatcccacggcatcgttcgccgatacagctcgaactcgagaggaacctgctgtactagacggcgacaggcggtcgttagtggcagatggtcgactggcgcgaggatgcgatgccactgagcgtgtgtcaaaatcggactcgtagtcgtctgaatagctgttcaggcttattgacgtattgcgattcgtgtttctcgatttctgcagcgagtgtagaacagactgaaattctaatgccccgacaagacttgcccgaatgggattcattgtattacgcctcgtttgcatgggccgatagacgtgcatgttatcacgaatctcggccaagtaccggtttcgtgtttcgtcatcctcctcgtcctcctcgtcatcttctttccatagaggaacagcctcagcacgctccaaaatatcaaaatcctcagttgaggctccgcggagcagacttcgtgactctgacgctacaccgggatcgtcgtcctcgatggtctcttcgatctccagctcttggttttccggtatatgaaagtgagctcgcgctgcgaggtctctctcgtgctttctgcgtcgccgtaccatataccagtgccacgttaccaccattacgacatagaaggcgtacaagcctaccatcgcagctgcctcccatacatgaagtttcccatcggccaacaaaaacatgctgaaaacgacggccactatgaagtagcccacgtctcggacgaaacttctccgcgcgaccttgaatggccgaactaatgccatggagcccgcgacaacggacgtgatgaaagtggccgcgccgattaactcaccgattgccaagctcccactattcgaccgcatggcggcgaaagtggaaaacacgtcaggacttccattgccaaatgcgaggaatgtcacgccagtgagactctcgctcaatcctagaatgctagccaatgtactcagatcgatacacaagaaatcgcttgccgcgatacctatggtactgaagagcatcgataaccacaggatcaatatcgcgaatgctaccggttttgcattggccagcccgcaatagtagaattgaaggtaggagattagaccatcctcgtgatcggggcagttggcgcggacgtatgcacactggtttttgacgttgcgaactaagcgacactatcatcgtgtgacagaacatcaattagcctttggcaccatctcacagggaaatgattcgggaaggttaagatacctctagttcgccctctcgtttgagcaggtttatatgcggccctgtatccggttgcgcaaactgcccatgttcatttgtagtaccagttaggaaccaactcgttattgcaataagtgtaaacaccaacaacgtggtgtaaaatggtcggattgaatatcgtggcttccggacggcaggctgcaggaaggacagcagctggttcatcatgacgagaagtatggcggcatcgtgagccgaagactttggatgctgtagacaaacttatgccggaaatatcaacgttgaatactcaatgcatgtacaatatctacctcacgcatccaacagatgtgggtttgtatatggcacggtgagtgcggtgagtgcggtgatgtcagctgagaggagctgtggcggagctcgggagtgggccaatgcacttagtccgccgatcgttgttgcactgaggaaacaggttaggagggtcgatcgcagatagggttgtaactagtccaagataagagggtgagaaagtaggaattggccgttgaaggttcaaaaggatggaccgaagctaagcccagcttgggtacaaaagtaatacctgatattccaggcatccacggtccaggattacgtgatagatagtgcgtcaccggtacatctggaccaccgtatgtttgttgacttccccatttgttttgtctcatcgacatcaacccctctctccatagaactttccatttcaacgctgttatcgccatcccctatcgggggcaaccgcaaccatgccgcgtgtcgcaaacaaggtacatcgccgctctaacggcaactcgacgccgcacaaaaacacaccggccaagtacggatctggatatctcctggttatcgcattgaactaattatatcaggatacccctcaacgatgatgagggcgagaaggcagcgcgtatggaggctcgtcaagcacttcatgatcgccaaatgagtcagattaaagcggcagtcaagacgcctatgccaccccgtcggtacaccctcgatcgtgaagagagcgacagtcccgtaactcctcgagcctcacatcatcgcagtcgcaccagcgatgtcaatggccgtgcagtgacaccgatgaagcgcgtgcctatcttggccaattttgaagaatggatgaagatggcgaccgataacaaaatcaatgcgaataactcctggaactttgcgctgatcgactattttcacgacatgtcattactgaaggaaggagatggtgtaaacttccaaaaggctagttgcacccttgacggttgtgttaaaatctacaccagccgagtggacagtgttgcaacagagacggggaaacttctgagtggactggctgatagtcgcgacaagagagggcgcggggaggaggatgcagaggatggcgatgaggatgaagaaggcgaggatggtcagcctcgcaggtcgcggaaaaaggtatggtctatacggtgtcagagatttgggattttgactaactagatgtgtctagacacgttcccatgaggctaccctcgcgccgtcattttcgtcattgcaactaaagaagttcgagctagagttcgccgtggaccctctattcaaaaaagcatcggcggactttgatgaaggaggcgccaaaggcttacttctgaaccaccttgctattgatagccatggaagaattgttttcgatagcagcgacgatgctgtggatgatagtgcaaaaacctccgaagatgaccgtcaagaatctacggatcctgaccagcagaccgatgaccaagcaaaaccaaaccagaaacccgcaagcgacacatttgagaataacacggagatcgaccttgctacactagcaagccgatttttcccagatctagatcgcctagatgaacaagatatttgtccatcgcttaaaaacctcgacttgggtgaccccagcgggtcgctggatctccctctcctcaaagcgccagaggaatggcggcaagacaagatggacgaagatggacgagcacatgatgacccatctggtatcatgctggacgacgacaacgctgtcgggtttgatgacgatgatgctaccctagccggatttgatctcagcggcgacactgggtttggtgacggaggagaggtatgggctcgggaagccgccttggaaccaatgttgaatgttcaccggaccacccacgatggggataatgatggtgagggtgacgatggcaatgaagacgcatatgccatctccatgtctcatcaaactaatagtcacgaccacgagaatattcttagctactttgacaacgcgctacagaagaactgggctggcccagagcactggaagattcgaagaatcaaagaacatgccacacccgctacgtcggcgcccaagcagcgcaaagaaaaagagccatttgagattgatttcgctgcccctctggatcctgctgtcgcggaattgatctacaccccggccagctccaactccgccgtttcattacccaagacgcagtggaaaacaaagggtcgcaaccttcttcccgatgacaagcatttcaactcccgtaacctactcacattgttcctcaagccgaaggcaaagatgggctcaaagaagattttgggcaaacgccgccggcaggatttgacggctggtaatggagatatggacgaggcattctgggcaaatcgcaagccggaagaaaacgccggcgaggaaggtgctgcaggtgcctatgatgccaatttctttgctgatgacgatggtcttgctttcccgaacggcatggatctcgatgacgacgacaatctaccattcgcggatgcccgggagatgctctctccgccagcagacgggactgcaggcacatcggctggagaagcaggtggagcaactggactcagcgcgcttttgaatatggttggcgccacgcctggccgaccgggagctggtggctacggatcgcaattggtgacacaaggcggtcgtcgtgcacgaccagactacgtggcgtatgcacgtgtcgcaaagaaggttgacgttcggcgtcttaaaaccgagatgtggaagggcatgggtgagcgcctggttgatgcggtagactttgcctcagcttcacagccaggagccgtgtccagtgatgctccgaccgaacccgagagtgaatcggatgcccctgtcccgcctacacccaagggtgaaagcccagagcaggtgggtggtcggctacggttcacgcaaattatgaactccctcaaggaagtctacccgactgagactctacgcgatatcagcacctcattcgggtttatttgtcttctgcatcttgccaacgaacagggcctcgtgctggagagtgatcttagcaagatgggcaatgatgcggctaccctagaggagatcttcgtaagtagggatacgcacgctatcatcgaagagggaggagggatgtgaaagctctttttttcagttgcatgtacagttgacatgggtagaagcattacgatatgcatgttggtcacgagtgatgaacaggacggtgtgacttggtagatccttgcggcgttatggttttgctttttcctgttcgcagtgaatggcgctcttgggtattttcgcctcctggaattacttcttttgttttgatgaattcaaagaagttcatatactttctggtataatgcttaaatggtctcaagtcaaagtaggattagtttgtcacctcaagtgttgtatgccggcacgaacacttgccgatgctaggatgaaaatctgaggagcacattcatatgtatcattgcaatatattcatttgttggacaaaaatcaaaaatagaaagagagtaaatacacaacagtgtaccaaagtccaaataggtatctgtatctcacaccaagactccacgcgtcctagggtgtacattaaactccataacgaggagagagcaaataaaagaatgttgaacaaatgtccgattgtgaagcagatcgatcgaagatgacgacctgaattgtagttttgggattttccatgtttttttttttttgtattttcgttgttcttgggcactttcattccccaccagggaaaatggaatcgaagcaaaacaccctaagtcaaaagatataaaagacaagcttgcagtcatccacatttatttgcgtgcaggggccgggtacaccgggacggtggaagcctgatacgcgccgggaatcggcacggaatcgtaagtgcactcactgggaggagaaccccttttcataggcggactctggcgctggctgtgaggaggtggcgacggcgaataatgagaaggaggagcaaactcctcctgggcagtctggggggttggctgctggaccttgataggaggcggctggagttggaacgacggggtaggccgggtaggtgagcgcggcgaggcatactgagtagtttggggttgagccatgcccttctcagcagccgagtaggggtccacagggccgacggcgtagattggggtctttggagggtaggaagtgaaacctgtgaagccgggggtgttcggggcagattgcaggcgcagttgtgcgagatatagatctgaacgggcgttgtcacgggtgtccatggacttcatcagcttgcgcttgctccagacgcggtagaagactaccacgtagatcaagataactaggatttcgatgacgatttcgatgatggcacagacgaggccccagtcttgtagacgacaaaggagagcatagtcgacgctgttgtggtagatctcctcgcgggtgttctgcgcgcaggaccatccccacatgtccttggtgtttcccgtggatttcgagtgctggtaaattgccgcgccgacgacccacatgatcaggttcacggcgaaaaaggcgatcgagaagctggtgtagtagacggcggccttttcggcgcgtccgtggccgccctttcggtaggcccagaacacgatgagacaggcgactaaggaaacgcaggacattcccagaaggagatactgagcccatgggttggttccctctgcccaggcaggaagactgttacgagtcggcaggtgcttggttgcgttaaaaacagtcaatgtcacggctaacagagacagcacaatcagactgcaaccgaaattgacgcaacgcaggaagatcttggcgattctgacgcggagtttgattctctggtgacgattagtaaatagtatcgattggcatcgtgggctttcttaccaggtctcgagcattctcgacttcagccttcttttcttgcttctcaagcatgtactcctcgcggaaagttggactgagcggatttaacgacttggccgtctgcggcaccttcaggtcaggtcggaaaggcgacattggcacctggtcattcgcatgctcattgttcgctgccacataaccgaatcccacatctccaacatctcccttcgcctgagacttgggagggtcggcgaaaggtgatcgtccagcttctgtgcgatcaatgggagagtgaattgatgtggcctcggcgaatcgagcagtgcgcgggctcttgagcgaagcattgctcgtatcagagtcgctgcgagtctctcgcacggtgtgttgtggtggaggacccattgcactgtggtaagaggcacgggtgagatctgtaggaacaactggctcgtaggtcagaggggagttgtctcggctatcgtctgataccgccattgaatggatgagcaatgcaggcaaataaatcaaacaattaggtcaagagaaccagctcttgacgaccactggactgattgttgggaatagaacgaccctaaagtcgatacaccaagaatcacaagtgtggtgggacaacggctgagctatatcaccgctaccgtgtgcgaagcctgcgtacacgagtattaagtagcagatgatcgaaaacaaaaaaaaaaccaagataatcagaaagtgacaggaaccagcctgggcacctagaatatcaataatgttcgagtgcaggcatggcccgagaggcgggggaccaaaatgcaggcttttgattctcatcactcgagttgggccagcgtaagcgccgaggaggaatttgcaacagcgaccagggacatgattggaagacgcaaagcctgtcaagccctcttgctgcaagtgcactgtacctcgatgcttgagaggggagtgtgactggccgacgggagtgatcagccaagcttgtcacggtggagtaaccggccagtgagattgtgtagcggccatgctcactcctcacgatgcacgtccatcacgtccatcacccccagcccggcgctaatccgccgatcgtccaaccacacagaatgtagaaccgctctactccgtaatagtgtgtgagagagatgaatgagcggtccgagggaagatgtgactggaggtcaacccaaaatagaggtccagtcacatacgtcgattaagcacctttggatgttgggatgttggagaggggaaaacaccgagggggtctgtgcacgctctgctatttttgccttgaagcagagcgtgtcacactcgtgatagtgatagtgccctagctcatgcatatgtctcaatcctgccgactagcttttctggggatctctccagtatcccgtcttatttttatagaaagtaaattgtccacttatcttgtcataccctattcccgtcttccccaagctcttcgatcttaatatagaatctaccgagttttatatgatgagcacgataattcctatgcgtgaataccaagataggtagccgcccggacgggaacgccatttagttagctgcagatgtgcatatcacgtcagcccagtcaagagccctggaggtacctcggtatcggtatccctgtactctctttcgcattctcttctcttaatacctccagttctccccctctatcaatgtctgtcagcttcatgaagaaaaagaatccagtgaatttgtcgctttcagtcaactactccgtagtcatatcacagccatatatcgaatatctgtatgatgggatgctccataaaggaacggtttaaccgccgactagaaaggcgccaagctcgcaagcaactgatgttttcttcatcatcaccgaaagagataggtgcatctatgataactggctggccaaaagaagccagagtcaatgatctcaaaatagaattgaaaagcgcctctgatatcatgactgggcaaagaaataccgccaataagatttatcatgagagtactatgaacactctgattagtattggccgttttatgttgatggctaatacatggcccctgcccaggtgcgcattccaggacatattggtacaatacgtacttccggaattcactacctacactctttgggattatacaattatattattttactacaaccatggcatcaataccaccccaacctggaatgttatttaaagactgggctctcgtgatctgaacagagagcttccagccacccaagacggattcagtgtccgagatatagctggggagtttgtagatttggggagttgaattcggccccattgggtagactatataaagccaagatacggttagagacggtatgattcgtaggcgcattaagttagccctggagttgctgtcaattacctgagagatcttatcttttgtacgatctgagccagttcagattgatctgccggattcacgccatatggtgccggtgttgccaacactgaatccagaaaaccgaaaatctgtttattcttgttagatgtatttctctatacgatacctctggaataacggagtggatttgggttacctgggatcttttccaagtataaccaactcttagatccaaaaggccaccacatgccggcaatatattctctgcgaacgtgctcggggcatgcgggcccaaaccccctggtgtaacgtgccaggtcttacaagaaagagtgcattcaattcaaaataactaagatgaggagagaaagaagaagtaagttgtgaagtgggaagcagccagttattatagctgaccactttgcaagcgttgcaaacaaccaaccttctcgcttagctactaacaaacaatctatggaatgcaaactagtaaattatgcaaacagtaagcgagcaagcaaacatgaagcataatgatagcgatccatgtggatcgtgacatacttaggcggttgctcgagcggttaacagagcagtttctcaagcagttatataagcggttgcccaagcttagtttcttaagtagttgctcaagtgattgacgatgaagcaattaataatgatatgacaaaagggacttaattttattagtggtttacatacaaattgtaggtacctactgtcttactactatcatatgacaggaaatatgctaattgtgaatgcggtactgaaattacaggcaggggggagaataagccagtcagagggtggctttgcgtagcattagaagttggaatcagtcgccttgctctgcaacgactatctagagacctatggccgtcgagatccctagtatattagagactaagaaagcgagctatgatgtagacgatgaagactgtgagattgcgccctcaaaactgttgagaacccacttcactgaacataagcacccgaagtagagtcttataatcgtttcatcactgaaattatcttccgtatgtctgatatttaaagatgacttgtctaaaaaaagactttgacgtcatcagtggcgaaaaaagccgcgcatcttttattgcacctagcgagcataagagaccgatagacctcttgctgtcaaattggatacagatgctgtatttgcagtctaatgagacttgctgagatcttcaaatgccaaggttgtaatggcaacatgtgcctcggaatacttagaaacacccttggagtgattaaaatacaacagccggcattgtgagagaggcgacttaagaggtggagtgttgcccacggaggtgatgagtaggcagcaactgtgttccataagcgggattgctttgggacactggccaatcatgtcgtacctcaagcatacactaggtaatgagacatgagtatgtactccgtacaagaagtagtattagttggggtatctgccaaattcacaagaagggtattattccagaactattttaaaatagtctatagttggtcttggcattagggtggcgagaccgatgttcagaagcactgtggtcgttcataggatcaggagatattgtccgtgccaaacctcaacagcccctggaccccgtttctacataacgtacccatggatgttctaatataattggctcgagaaacaatgataccaaagaatgacacctgctatgatggtcaggatacattgacagtcataaagttcccagcagaggggcttgagggagtggcaagagtggcaactgcgtgaacatatatcctacgaggagaagacaatgtttaggatgataatttgcataacgagaatatatgggaagtcgtatctgttataagagatgatatagttaatgcttgatctcaacgctactgtcggtagaatatcaatcctctcgaccacatggactgacagaaacgttttaacttatcggagacttggccacgaagcttcccgtttcatgcaggtatctagagtaatatatggatgacaagtaccagccacaggttatttttgggagtggagtacgcagccgtcaaggactgaacaaccttggaaggccgctagaacactccacaggggttccctggttctgaatataatgcgttgcatgatagattagatacagctgtcaatcaccgtaggttaaaagaaacggtactctctagatgctcatggacctttgtgccttggagactagctacatagtatatatgtatgtagttagcatgaccggcgtggtactgtgccatggggctctgcgaggtcgatcccccagccacctgaggcgcctaaaacgtacaacgttataagtacactgcctgaaacatggcgcagcaagtgtgttgcgccttgtgccaccagggtgatcatgggcaatgggcatggacatattaataaagtaattaaagctgttcaagaaatcagtacattacatagaacttgcgtgtattgtatgtagtacctagtgggtacatcggcactacagatctccacaagatcaggcgttctactgaattgagaattagaatgtattacatacaatatattatacgcgggtctccggggtgacatcagtccgattgcccctgtatatgcactccataccaagaccatggtagtaatagagaaataccggtttgaagtgagatgatctcataccgtttatacttaagcctcaagatgtcgatcgtactagatagatttctaaccttttctaatgaatgtaagtgaatgcaattgcattgtaaggcaacgtggacggaagagggaggtcagccgcaggaaatgccccacgagccagccacaaagtgttagcggtctacacagcctcaatcctaattaagtactgtgtacttgttcatacagagtatctgtattgtaatatcaagtcctcagtacctcattacctcagggttcatttctccagagcctcgactctccagtccccaccaaacatatccatcccctgcccagtttctgttctcacgctcactttctttgtgtcttttcttttttgccttcggatcttagacgatagatgagtgtaaatggtatgaactagttcattaccatccacttttctgttcaccactcacattcttccatctcttggtcttatttcgttcctgcgccccgactgttccaaccttcagatggccattgaatctcatccactcattccccgatcgctattttaaaggcctaagcccctgggatcattcaggtggatcttgagaagtttgaagctgaaaccactcgtcagcttgcgccacactcgtgagaaacgccccacacgccctggtcttcgctctcttcccccccaacctcgtctgcttgaccatctttgatatatcccggtggatgaaagttagtcaagttcatttcccccaccaatattccttgcattatcctaacatggcatctaaagtagctttcgcctttgctcgtccaccctttgaggctggcgcgaaacattctttctccatggcgacgttgatgtcgaacaacgagcccatcactgtctccaactcgctatccgcaaactctattaccagctctgaacccctctctttattcaagtcttccaaacccgaaagcctgagctcgattgccagcgccggcctacacgtctcgcgatcaagagatcaacttcctccgatgacaagtccaatatcactaccggcggatcggccggagcatgagaaggacgccgaacgaaacagttcacaggtggctcgggaggctctaggtgcaagtgaaaagtcgccaggtgccccgaaccatgagcattcagtccatgcatccccggagcagatgcaaatcgactcacacgcgaccgaaccatcatcggacccatacggatcaaacgatcatcaccacaactcactaatgcatacttcgactgtagctagccctggtcctattgaggaatccgcttctcaagatggagatcgccggtcgcgtgataactccgagatcgaccacgatggcaaatcattctcatatccgatgccgacgggtaacattaacgatccgcgtcgcggactgagcctaccgaccgcaggctaccatcgaggcagtcctcgctctccgtcggcgaagaaacaccgctgcccatactgcgcgacagaatttactcgtcaacataatctcaagagccatctgctcacccacagtcaggagaagccgttcgtttgtcaaacctgccagtcacgtttccgaagattacacgatttgaagcgccacgcgaagctgcacaccggcgagcgaccacacatttgtcctaaatgtggacgtcgttttgcccgaggtgatgcgcttgctcggcacaataaaggacaggggggctgcgcaggtcgacgcgcgagtatgggcagctttgcggcagatgacgactatggcgatggtacgaatgggggaaccgacgacatggatgggttgatgtacacagcagagcctgagcgcatggacgaagaggacgagcgaagaatgaccatgccgagcattcgcaagcacgaggcagatacagtcgctcgatctgattcaattcactcgcgccagtcaaacacttacccgccaattaccgccggtcgtcccagccaccttttcccaccgccagcaaatcatggtggatcaggcgtgtcaacatcggcttcacagtctacacacatgactttcccgcctgcgggactcacctcgggctcctctatcttccctaccaatagtatcagtgatagccctaagcccctgtccccgaatgcgctctcatcgcaacatgatagtgcaccgccacatcgcgcacactctcccagcatgggacagtccttgccacacccgcagtcctctttcggacgagcaaatcaatcttcaaatcacgcaccacctacactaggattgactctgccgcagccaggcgcgccgcagctgcctccgccgccgggtatgacctccccggatgctcgatttggcatgcaagctgcaaccaaacacactccttcgcatagccactccagtacccacagtatatctcatcttaagggattcgatggggcggatgccaattccagtgacgccagccaaatcgataagctttgggcgtacgtgcgaacaatgcacgacgaattgacaggcttgcgaactgaagttgcggctttgcgggcgcacgttgcgtcgtccaactcgatgcccccggctccggtagaagtaaacttgaataactccggaccgcggtgatacgtccttgggtggttcttgtacgatatggcgtggctgaccatcagccacgtgaactggttgttttgtcctcccctccttctccactttgtccatacgccttgattatcccatcctcgtttgagggtcaaacttgatgccctcatgatcaccctgccgacagttgccggcgttggtgttttctatgccccgttattctctttcttttctttctcttctttttttccccctttacccccggagttatgtcatccgggagagcctttccgttctagcctactttattcatacctggagtgcgctgcaaagtgtgtcctttttccccctcttcctttttttttttttgagcagccgaaggagtttggcgtgtcaaacaaaaaaaaatgatctgagatcgcgatggaatggagaacattacttctcattaaactgcgaccttgatcccctctgtcctgttgtcgattccataccaaagatggaatcatgtgattgtgtttggatatgtgcatggattacgctggatttggagtttttattcgtaatgctgctattaccgatttagttagtgataatatactcttcaatcagtcagatgaatgggtacggtataattgtttataggtagatgcttccccgtgggagacggatattatcttaaacatagcaattattctcaattttcttttttcctcgacctctatcatgttacaactatatgtccttgtggaagacacggattggagactgaggcatatctgctccagggatggtggaatatatactgacttgatgccaaagtcggcaggaacaagtttgaactcgtgatcaataaaccccacttgatcttctatatatttcccttattttacctgcccgggtgccatcgagacagacatcaagaaagattaacgaaaaaccaacgatacttcgtgactatgctcctagatgaccacatctccatggatagcccaagttaagagttaaccaatatgactcccttctcctacacaatccatccatctttctcaaatacacccaagagtctccttgatctctttccttgtatcataaaatgacctctccgctgctttcacaacagataagtctcatctcaccaagactagggttagcggattcacgagagatcatcttcccatttgaccttcgcgtatccccgtccgagttctcgggtcagaccttcaagctactgatagacctttttccaacaacactagcagttgaatttgatgatagggttctaatttattgtgtccaagtactgccaccaaaaccatggccaaagcgagttgcaggtgttccgtgttatttggcaaacgacgcaaatgataaggggccagtcattcccctttgctaccgcagtcgctctcggattgatatctctcaagatctcaatctcagggatagtgatgcttcactcgacgtgatatccgatttgttacgcggctttttcgcaaaagatcaaatctcaaccactaaatcacttggccgtcatagctcttgatcaacaaattgaccaggatgaggttcttaaggaccacattctgaggtctgctccccgctctgttgctcgttgcacctgcttatatctttcagagcatcacagggatagacctcgcgcgctatctgctcaacggctgctttgtccaaagcatatcagtatgctaatcgagatggctcctgggcctcgccccataccagcattagccctgaaccatcatccctggcagaaccaatccctcctacacagaatactgcccctcctcagcaagaatgccaatggacgattctcaatacactacgttgagactaggtgtaatggtcagctccaaattccgcaggcgaatcaatgcgttcgtcctcgggcgttctcgtcaaagatcgtctgggctctaaatatatgacaactgccgctcatagatttccattcgataaaaatgtctaccatccatctctcagcggcgcaataattgggaaattcaccacagggctcactcatacagacatcacattgatgaaactcggtgatggagtagactttgtgaatgaaccgtttggaaatacgtcgacactagccagtccttttcgactcggagatttcattcgaatggcagaaacaaaacgacaggatttggtattccttgatagcccctttaccggtcttgtcgagggcaagctgatgtctaaaatatcatgcgtgttccatctgacgaccaagatcaggaaatatgggtcaaaacccaacggaactaaatggggcaagactcagctcatgagctggtggacggtgcttatggctccgccatctggaataccgatcatcgagttctgggctttctcagttatgcccctggaacaggactctacaaggatcattgcttaagtattgcattgctgctgctgatcatcttcccgatagggggtatagcatggcctagagaatttatgtctctcaattcggacaaactcaggggtcagcggccttaggatagagtaaatattccgtagactagaatataaaaacagcgatctacagccgaggcacttcaaagacctcacatctcgacaaccctcggaaaattctatccggaagcacattactctatacagttttgaaatgtctatcacactcctacaggcaccggctgcatcctttgtgttgctttccgttggacatactgtatcattgctagactcagaactcccttaaagaatcgtattgattgtttcgtagatcaagggcagacaatggacagccgatccaagattcaaagctatcgcgggcacgaatttgtggacttgtgggactctagggtggtaccaggtgcgttgaactttggccttggtgtcttgttcaatatcaaccacgctttatactgactgccttgatcggtttctatcaacaggggagcgggttttttctatcaactggtaggctcataatatcatttctcttagccaagtttttaaccatagtaataggtcttcttcactggcaatggtcacaagatccaagtctcctccaagatccactgaacaaggccatggctgggatcgtgaatatcatactctgggctagctctgcctggtatgctaagcagggtatcattgatacttccattgtccttggtatatctgctgcgttgcaggctttcagcgttggcaaggcttgcctgtgaaatcatcgagaatatatgtttgaatacttataggccgatcggatgagcttgggtgtcttacaaagagatctatcgtgcttttgcactcgtctgcttttgatttttgaggtttagtatgttgatgaatcatgatcacaatccacagctgttgaaaatttccgagatgacagtaggatgaaggtcgacaaaggcacccaacagacaaacaacaagttagccctcctccatttgagaatcctgctccaacctcgtttcttctctacgctggatagtccaccgaataaacaatcccacatcagaaacaacagcccgcggaactccacccagcatccagctccgttgaacccacttgggaatactcccaccagcctcagaagtcgtcaacatagtccaccgaaggtagcgatcagtagaagtagcgggggtattcaaatttgccgtagacgacggatccgaagaggccggagtaggaagcagcagacgctcaacccgctcgagactggcatagtaagcgaagactgcccgctggggaacgatatccatgatctgggcatacagtccctcgaattgggatcccggcatcttcggcttaggcaaatagaaaggaacctgtacagtcataaacccgtggcatgggctggattgggttgctgggtatgagctggcgaaagtcgccgacatagtccaggatatgaaggcccggggccggattagtgcgcttgggtggaaggtgtggacaataagattgactgagtttgggagttagtaggctgtccttgtgcatgagttttcgggatttttatacatacgttcgacctcgaaatgcttgtagttgatgtttccaacagtaagtggttggttgagatcccagtgtctcggctcgttccacttcagcagttgctttacgctcgtcacactgggtgtgtactccatctcgtgctcagcatggttgtatcgcagcccgtcgtggaattcccatagggaaactgtgccaggcaaacgatcggagtcttggtggtcactttggcgacatacccagaattcctttttagattttgagtcctcttggggggattgcagtgctcgccatccccgtgaaagcttcacctttgcctttgagggtggagaagagcgcagcttgcagtctggtttcagcgtcgatggaaactggtttaggagaggctgagcttcaactaggatggcgtgaataaactcccgcagatctggggtgttggcatccccttgaagatctgggtgacgagggaggctagtgaacagatgtggctctagttggattatcggcatgataggggatgaagggaagaaggcttggcgatgaagtagatgtacagatgtacagatggagaaaggtagtgaaaagaagaagtgagaaaggaaatcaaattttaatacaattaggtctttcttatttgtttgcgcagttcaagattatgtgagaatagaaggtcgcttgtttagtcgctggtttagtcgcttgtttagacgatcccaggaacacaactatattctcgtgaagacctgatcaatcatctgtcaagtgaatcttattgatcaaattaaaacttgggcaacaatttatataaatattatagagactatagacagcggatcccaggtccaacgctgccagtctcgaacatctccacaagtcccgcgcctagtgcttcctctagcgcccatcgaaagcgcatcccatatagctctttccatttcttagtcctacccggcaagacccctgcaaactcgccacgggctcgcttggccaagtgaaagctcttgtcggtttcaacagctccatcccatcgatctttcaacagacccagaggggcttcgccagaagcggaccgccggagaagagcgagcagatgtgcacgacctgaccctaacaagcggagatatgttcccgtgttaggaagagacaagaacagagttgccgcacgagcctgcgcatttgactgcacagggcgctcggagtgcgagatagactcgcttcgactggctgacgaagtcgccatttgaggtagattaggaagtgatgcaatacttaatgtgccctgtgtgtaagatgaggacgagacaataaagccggcacgtagtagcgccctgtactcatccgttgtgaagaccccctgcgatatcgccgaggatgttccaatccgtttcagtatatcaaggaatttctctgcaaacttgtcagttggcgacgtccaaagaatcccaactccaaaactcacccttcactggttgttccaatgcagggctttcctgcaccagcttgtcccaatcctctgctagcaccaaacaatcgcccagccctgccgcgtcgttgcctcgacccggtataatgagtcgccgaatccgaccagcctgaatttgttcgacgatttccctctccacctgtgtcggtgcctctagaagggtatggacatgtgccacagaggcgaggggaggcaaagatcggcgtagattgaggacttctgcgatacgcgtgctgttcattcctgcccgtgccggaagttcttcgaacatgccatcacggatatattgaatagcctgcagcacattctgaaccggtgcagtctccgctatgaaatgagacccgcctacatctggaagcgggtcatcgaaacctagatctgcagtcggttttaggctgcctccgccatatgtaggttttcggcgcgcaagggcggcaaagggcgaggcgcggggtttgggagcagaggatttgcgtttcttgacaccagataccggagcggaggtaagacgtaaggtcatggcatgggtgtgtgaacctttcactatgcataacggattcggagagaaatattgccttatgtcaggtgacagctagatattccgccaatcacagccgatctgccatagttctgtaatcaaataccaaaaataccgtacgggaacacccagaccctcaagtggggtaaaagcggtatgtcacagcaagggaatggataagttgttgtcttccctcggttccgcgatatccttttggcttcaaaggacttttaagtgatattcatcgtcatctctgattctagccctcgggcatctagatttgcctgtttcttcttatttgtcctagcaaatccacagggcaaacttgcttctccatcacttggcactttcacatgacgtagtcatgagaaacgcatcgtgtaactaacatttctttttcttcagcccccggtttttaggactctaacccctcgtttgatggccgcacctatccattgctattgtcaagaaggtctatctcatattgctttttgatattattttgcctatccgcttaggctcggctcaatcaccatgacggtcttcatagcatctctgtatgtggctattactggacctggaactatatatggctaaccggcgaatttcttatatagatttttgccctacactatcgatttccacatcaacaattcgcgcgcccgctctccccctctaagtcctccaagtcctccgtccgtgaaccccactattgaggggatcacacccatccccaattctaccgctagcctgtttgagaagaaccttccagggcaaacaccgggtcttacaccaggagctacaacggatcatgagcgcatatttgctgcccaggtaggcaagacagagcacgagacaaacgggtacccgttccctttggccgtcgagcaggataaccggctcctcacacggagtgagggtcattccccggtatggggtgccacaacctcgctcaatcaaccaaagccggcggcggtcatgtcgccgtctccatccattctcaagcaccaagatcctcgccccgccaaggaacctacgcaccggcctcctgcagttgagaccattgcttcctatgcaagactaagaaaggccagcacagcgagccgaaaattatcattttcgaaagctgaatggaccatcgagaccgcggagcagggcaatggtggcctgcgtaatgcagtgcgatccgcaacagacgccggaggcttggatagcatgatgtgggtgggcaccttgggtatgcccactgacgcgttggcaaagcacacccggcgcgacatcgcggagaaattggaagatgagtacgggtctttgacggtttttgtaaatgacagcgactttgatgggcactacacgcattactgcaagaccattctttggccggtgttccattatcagatcccagataacccgaagagcaaagcttacgaggaccattcgtggatctattatgtcaagttgaatcaggcttttgcagatcgcattgctaagcattggaagcggggtgatgcgatctgggttcaggattatcatctgttactggttccagctatgctgcgcaaattggtgccagatgcacaaatcgggtttttcctgcatattgctttcccctcgtcggaggtcttcaagtgcttggcgcaacgcaaggagctcctccagggcatgcttggtgccaaccttattggcttccagacagatgaatactgccggcacttcttgcagacatgcagtcggattttgtgtgtggaagcaacacccgaaggaatccagttggaagacggttttgtcaacgtcggcacgttccctatcggcattgacccaacttcttgggataagcgccgccgggcaacggatgtggagcgatgggtccatgcaatctcggagcgctatcaaggaaagcgtctcatcgtctcgcgcgataagattgattctgttcggggtattcgccaaaaacttcttagctatgagcttttcctcaatacctacccagaatgggctgataaagttgtgctgattcaagtcgccaccagcaccacggaacaaccagagctggaagcgactatctctgatattgccatgcggatcaactccacacactcaaccctcgctcatcaacccttggtattcctcaaacaagacttggccttcccgcagtaccttgctctcatcactgtggcagatgccctgatgatcaccagtctacgcgagggaatgaatttgactagccatgagtttgtctactgccaagatggtcgatggggcaacaaagcctacgggtcattaattcttagcgagttcactggcagcgcatctgtttttggaaatcgtgctcttttggtcaacccttgggattaccgccagtgctgcgaagcaattcacacagcactgactcgcgatgagaaggaacggaaagaggtttgggaggaaatgtaccgtgcggtcctgaagaactcgactgccaattgggtgaaatcgttcaatgaaacgctcacccgtgtatggaacgaacagtcttcgcgagaaatcatggcagtacctcgactgtccgtatccaggctgaccgagcgatatcgccagtccaagcaacggctcatgatcatcgattacgaagacacgctcgcctcttggggatcaccacgcagcatcattctgaccacgccgcagcgcgcaatcacaactctaaatgaattgaccgaagaccccgctaacgttgtctacgtaatgagtgcgcgtatgccagaggaaatggaacggctgttccggcaagtcaacaatctgggacgaattgccgaaaacgggtccttcgtgcgcgagccgaacgccgattcgtggacccagcttgcagacaagaagcatgtcaaatcatggaaggcatccgtgtctaatatcctggcatacttccacgctcgcgtcgagggtagctggatcgaggagcgccattgctctctagtcttccaccatggatccgccgaagaccgccaagctgcggctcgatctgccgctgaatgcgcaggcaacatcaacgatgcgtgcgctaacctgggtgtgcatgcgattcccgttgagggtgctttgatcgtggagaccactcacaccaacaaggcatctgcggccgcacatgcctggaagtggtatatggcaaatgccgacaaaaagaaggatttcatcaaacctgacttcttgctggttatcggcgataatcgcgaggacgagccggtcttccggtgggctaataaactgcacagcacaaaggccgtcgactatgctatgactgtcacattgggctcgcgcagcactgaggccaaggcaaccttgacacagggagttactggtaagtctggatttattctatttttatttcggttgactaattttttacaggcgttctttcctgtctgcaacaattggcagcacaacaggccccgaccaaactgccattgcgagagtgaggaatttgattgacttcggatttccaggacatgaacatgcgaagacgaatacacgaagatagcaaaacggaccggagttctcattttctttagcaactatgatttggtgctagcatactattgcggcgcattttggatcaagttgagacagtacatacatggatatggaggctctacaggaagacatatttgcattgcatcttctaataatttcgggttaaagtttagaaaagaagaaaaaaaatatgattggaacaacagggaactttcctggtggtttcttgcgaacagttaaagctcagtcatttggttagtcctcttaagacattttataattttatatgaagcatctatggatgtcaaccaagcgaggtatgattgtttctggcccccgactgggttggataggataacaagccagaatcaatcccacctcttccctattttcagccttcactgtcatcaaacttcaagaattccgaggtggtcatgtactgctaggaccaaataggcaggtaccccccaaatacaggtaggactttcctattttagcgtttgtgagaaatacgagttcaggatatgcaacttttccagagaccaaaaaagtattatgtttactccaatcaaaagctatggtttatcgttaaccagcaccgcggcacctacacagcggccgggataccagacggcaaagagaagagccactaacgcaataggcgcgaattcaaggcatgcgaaatagacctcattggtttgcagctctcccatgagaccctgggcggtttccgcaagacggaagatagttctcaaatagatcatgagggtcgaaattgaaaaagccaagcagaagagcccaagcccattcgctctgatagcaagtcgagctcggaactggaaactcgccgccacgataacaaagatagtcatgacaaagacctggtatgcgaggccgcccaggaggatattgttcgccgttgtgggatcttcccggcgcgactctgtaacgccaatgagacacgcaccggcgatctggacgattgttgagatgacatccgaagtaatgaagaaggctaggatgacccttggaggtaagaatgagtactggctccctactcgtgggatcagtgccgatagaatcgtgtagacgccagcggcaagcaatacaggtgccacaacgataaaaaagtagttgaggatgaagtagatgaggtgatagggatccttcttagcggagagggatcgtgcaatgtaccctacaacctcgaaaaccagaccggcggaaaaggtcatccaccaccagctgcggttcttgatagattgagtcgtgtggtagacgaagtgaagaaaaaaccacgcggctgcgaaggcagctagggcaatggaaggagtgtagccatagatgatcacgggggtgtcattttcgccgcccggatttggaaagtaggggtcaacatagccatatgagcgtgctatttttccattagtgatctgaaacgatggccctggagagctgcgttcaagtgcggtgcctgtgatgtagtggaccatcttttcagccctcggattcgccgcacaacagggtcagatcttctctatgtagtaccgatgaacacgctaagaaaggaatttgcctcattttgtagtctggttattgaagggagatttagcacaggcccctttacgcgagctgccaagcgtaatgtcgcatagcccaatccagaatatctcgattgtttcccgatcgggcctatcgcaaggtctcatctataccagaggacctgctaaatttgatcccttgttgttcgcacagccctcttacgtcggccacaaatttatgccattatatatctcttgacttcaatgtctgtgaaactttggaaaaacccacgtgtcaaggcttatgagtagctgactcagcttctcggctgtccatagtctggggaataagccgaggttcgccgatgtcgtatctgtggggaagaggttcaatatcagatcatataaatcacattccttagacctttagaccctcccatctaacccccgtacatatcaaacactactgcagttatgtccactatcaacccatcctttcaggaagccatcaaggtcaccccgcaaggccacaacaaatacagcgccttcctccggccagaatggtgcattggaaccggtatagtagaacccacgtaaacaatcctctcccattgacccaagctaacaccccgccagtcccacacggcggctacacaacggccgtaatctaccaactagcgctaacgcacttcgcgcacgcccacccaacgcaatacaaaagcgccgcgtcgccaatctcaatccaactctccttcctgcggcgcacagcctcaggctccgcaaccttcgaagttgaagacgtcaagatcggcgcgcgcaccagcacaatccacataaagctactacagccctcggagaaaaagcccggccagctggacaccatggtcgccggctatatcactgtcagtccgccggaggccgaggtcggaattagcgcgagcacagggtggaaaccgtaccctgctccggtggcaggctcgcgggcggacgggtccgttgatctagcagcgctgggccgcacaggcactgacggcgtttggacgaagctcgagacgcctttttcggatttccgtaaggctgcggcgcagatcgagctgtttgggcctggtgctggcgcgacgcaacagaagcgctcggggaatatgggtattgatcagtgggcgaggttccggcctgggggtgatgtgaatggccgctggacggaggctgcggtggcatatctgattgatatgtttcctatggtgttggatggatttgatactatgtctgctactgctgtggctgaggagagtgggacttcggttgatgaagagaaagcgaagttttggtatcccactgttacgctcaatgtggatatgaagaagcatcttcctgctgagggggtagagtggctttatagtcgggttgttactaaagttgttagggatgggcggacagatatagatgttacggttcttgatgaggacggagaggttattgcgctaagttcgcaagttgggttggttgttagtgctagtcggaaccttgggactaggaagatggagaagttgtagatagtcgttttaccgatatatatatacatgttttgagaatagattttatgtgttcaacgcaggcttagtttatgtctatctatatatgatctatctgttcacttctgtatgtgcaaatcgggttttatgtacgggatcgacatccccgcatgtacatcagggaagtcgatcccctagtctgtgcttcaagcttcgagcctggaaagaaaaggacgctcacaacttcgagtcagaggtcacaatccaaaatgccatggcatccgccttgacgacctttctcttggtccactccaaatgtcctccagtctcctcctcatcctcctgcaacgcctgcgcccggacccagaatttcttgccgagcctcccaacaactcgcgctttgataaccagcaaagcaggcgtagtcacccgcttcttatacctgacatccagttgtgcggtaaagattttcccgcgcgggttatcctcagccataccgggcgtagtgggcgcattggtatgcgccgcgacagcgagggacatggcctcgtcaatcagcgtcgcgacaatgccgccgtgcgcagtggatgggtggccagacacaccggggctgctaaggtcgaagatcataatgatgtccgcagggttcaggcccggggtgggcttcgcgacagatgccgcatcttgttttgttgcggggagccaggtgggggcttcggcgggcgcgggtgtgagattgcgccgttgcagggttagacagtgggggattgtggtaggtgtgttgagggtttgtgcgaagtagccatcttcaccagttgtaggctttgggcgtcgtgagtcagtttggattggtgtatattcggcagaggaaatgagattatttgcccatgagttggagcggaggtgcgcgatggcgggggccgggtcagccatttcttctttcttctttttttttcgctggtattttggtctcggggattatactgcaattgtcatagttgaggtgcagctaaaggacctggcatgaagtgtttcagcggtttcagcagtatgttagggcgccaacggtgtcacgacataaattgacctcggctccggctatgaccgatcgggacatgataaacagtcacgtggatatatattggatcaaatcacccagggtccaatggatttgcaaaattgatttgcggtggagcgaacatcaaaagcttcgaagtacatagatatctgtatgtattccctttccttgaattgaagaaccaatcatgccagtctcgagcacagacaatgcattgtctcacccccggcatgtaaccggtagttgaccgtaagggacccgatgggggaatctgggaatccggacaagaatgcgaggataaacatagtcccaacctaagcgacttatctcaggtcctgtatcactttagcgcctgctagtgcactcagcaatctccgaacagaccgttatgattcgtacggattctagcggcaggggcaacttagcctgactgggtttagtagcacagccaaggaccctttcatttgggtatcatttttccatagacccttttgggccagctagctatcaaaacagggaaaacgggggaaacagggcccctgtgcaaggcgaatattcctattttctccaacgaagatagaaatatgaaaacaatagcacgagttcactatccaccgtggcatgccaattataggggtcagggccgaacctgccaagggaagttctttcgaaaaaaataaaaataaacgtgaaataccttggataccttggaataccctggatacaaagcacctgcccattcttgtttttccctcctcaaaccctcctctcttctctcttctctcttctcttctccttgtacacagcatctctaatttatccatcatgcgttcctcaattatcttcctttcagctctggctactgctgtcatggctgacaattccactgacacttacaccttccccgctggcttcaatattggtctggtggatagcggcaccctgagtatgtaccccgaccaattctgacacgacgaagcgctaatgaagtaggctcctggtgctctgctcagcgcaacacctgccccgatctttgctcaagtggtaccaagctgaactcttgcgacccggtatgttgttgtgtatcgcgtccatacgaccgggagattaacgctttgaacagaccaccctgaagttcagctgtgtctgcagcgatggttcaaccccaaatgtgacctcctacattcagaccgttcctttctacgtctgccaggctacttacggccagtgcatcaactcgcaccccaacgatgctgagggccagcgcgcctgcaagcaggcatcggccgactgtggctccaagaacgcaagtgcggtgaccaccacctcttctgctgctgcgacttcggccagcgctacgagcactctggcattggccactacgaccgattcttccaccactgccacttcctccgtcgctgctgccagcactaccaccaacgctgctgtggccctcggtgatctgacccagtactccactggtctgatggctggtctcatgttcgttgctgcgcgcatgatcctgtaaagggacgatgttcttcggtctttgggcagttaattaccacttgatggttaggtcgcatagcgtcctctttgttgtattcccttaactcatcgcgttgccatttgctttttttccttcgagacattcgattcccctctgaataggcttgacacattacgatcgtccgcatgtttatgaacgcggcgcctgtcctttcttgttttgctttgggtcggagttcattttttgtctgcgccggtgccgatttcgcgcattaactattcgattcaaagtaatatcaccaattatttccaacccattgggcagcagaatgagagtagtgacgattgcagtgtaaatatttgttatttcacctacataaaatattccaaatcaagtaaaagagtcaaaaggcacacatcagtcgagatgttttgtggtgttcctctcgccaagactttttctggcacacactgaaatttctcaacttatcgatagactccaccatcaagaacttcacgttcgctcttcctctccctttcccacatcaaacatcatgcccgcccctaccaacaccctcctcattgagggttccttcaccgagctcgccgacgagtttgcccagtacatcgatgccctccgcaaagagggtagcctccagtccgagatcgccccgctcctcgaacctctccgccagcaggaacagtctgaaggcgaggccgaccttaagcagcgtgatgaagtcctgaagaagctcgtgtcgtctgcgaccgctctgaacagtgcccccgagaagggtaagtggacaaaaagtgtcaaagaatgatctgcagacagagtcgggaatttggcacttggatctttgatggacaaaaactgacatagattgacataaatgcagagatcacctccgcctacaacctcctgatccacctcgttcaccagtcttccgacaccgacgtgttccttcctcgcatctgcgcctatctcgctaagcccatcaccacctcccctcagttcggccctacgctcgccatctccattctcaccaccatcttcaacactctgtctgccaacgacgcgagccggtaccacgttctcctcgctattgtggccgtgatccgccagtctggatctggaattgccttcgaagccctcaagcctcagctcacttcccagcttcccacatggctctcagcgtgggggttggataacgatgacacccggaagttgcacatcgccattgccgaggcctctaccgctgccggcgatgaggatctggcccagacccacatcgtgcaagcgcttgagaccatcgacccttccgacgccagcaagcccgaagcccgcgaattggctgtgcgcgctctcgctaccgctctgcgtcgctctaccgtcttcgacttcactcccttgaccgcctcagacgccgtgcaggccctgcgctccagcgacagcactctcttcgagttgctcgagatcttcacctcggacaccctcgatgcctacgagaccttcatcgctgccactccgctcgcttccatctctggcggcgtgctcgccgagtccgccgatgccctgcagaccaagatgcgtctcctcactctcacctctctggcatcctccaccctttcgcgctcgcttccctacgccactatcgcctctgctctacgcgttcccgcctccgatgtcgagatgtgggtcatcgacaccattcgtgccggcctcgtcgagggcagactgtcccagctgaagtccgagttccttgtgcaccgtgccacctaccgcgtcttcggcgagaagcagtggtccgaggtccaaggccgcctgatggtctggcgccgttccctcgagagcgttctgaacgtgatccgcaccgagcgtgagcgtttcgcccgcgagggtatccaggccgcggctgaccaagaagccaacgccaatcgcaacggtaacggtgaccgccgacgcattcaactctcgcagccgacgcgtgaggttgaggctagtgccgaatagttgtgtccttttttataaatggaaaagttcacaaaacacaaaaatctttcagttaatagaggggaaatcttgctgtcttttcctcatgcatttcttttccctggccagttgtagggttgggtttttactgcccccgttggatgtttgggaccccacgagtcatgtcatgtcaatcttagtcttgttttatgttttccggagggatgactttccgtttgttcatttttttctattccggcttaaagaatattatatttctttagactggtcatggttcatatccgtagtcaactgacaacttcattggcttcaggttcaagtctaaaaatgctttctatactctatattcaagccgagcagagaaatcacacaactcttccccctaaagggacaccaacactatatacatcgatacaaacacaagaatcccgcttagcgagtgtgcaaaccacgagcctcaataccggccttgacctgctcatagacctgctcaacagagctatcagccttgaccgaaacaaccttattcttcttctcgaaatcatcaacgacaggcatagaagtctcgacgaaagtatggaagcgcttgcgaatagaagccgcgttatcatcatcacggccactagtctcaccacgcttcagcaatctagcctccatgacatcctcagggcaatcaaggaacaacacaagctcggaggggcaaacagtctcctcgaagaaaacagcctggtcaagcttgcgtgggaacccgtcgaccaagaagcgggccttggtgccagccggaggcggcgaggtcgccagcgagtcggccatggcattcgacagtaacgcaacggtgacttgcatcggcacgatcttgccttcgcggatgtactcgcgaatcaggtcgccgtactggctgccttcgcggacttgctcggcgcgcaggaggtcgccggcggacaggtgcacgaagccgtagtctttgacgaggttggcggattgtgtgcccttcccgctgcctgggccgccgaggaagaagacgactgttacgtcgtttgtggagaagcggggggtggccattgtgggtggttggtgcttgtttagttgggagggggggttgaaggagatagggatgaagttaaagggggtttaggactggggttcgagtcgaggttgcttgtggggtgattgtgtcggtgtggcttgactggaaacggacgttagttggctttttccttaaatgtacgctaggccttccggacttacttcaagctagtttggacgtgaggtgcggacgccggtgcgggacttgacgaggtagacgtaggcgccggagctgatggcggttatgatgatgatggggatgattgggaaattggagcggctggattgaggggcggagggtgcgcgtggcggcgaagatctcggaggattcgagtacaggcggtggggtacctgagtcgatcgggtgaatttctggctggtaaggacgagaggcttggagcggactccggagaattgacgggctagagagaacatagagaaagagggaggcttgtggttgttgaggaggtaaaatcaaaaaggagttgggatcgccgaaacgggattagctgatctgtatacctcgatgcggtacgcttcggcttcatggatctgggcagtgatattaggtaatacataatgatgacaactgtttatattcatacatgccaatagattactagatcagtgagctcctcctatatacaagtatatgtcgtacaatggaggaacaaggtgagttgaaattaggtctagaacagtatgaaactcggatccgatccatcaccttagtacttacatagtacggagtagttagttacatatgtgacaccaaggttcagcttttgcatagaacaataacctggtactcatagttcggggctgttcgctattgttaccctaggtagagggtatgtcttgagacaaaatgctctctgtccacgtagtcccaacttttagtaccaccctttttttagcatccggggtagtatcccttcgtttaagatatcttaaacctgtgcagtcttagcggtatactatagttatgattgggttacggacgagcggctgtgccaacccaggtctaagaaacatgccgagatatattttcaggactcaccgcgtatgtacgtctgcactttagtagttaacattgaaagggggattcaccaatgctagagataaattctgacctgtcaatctcatattatcaagtggtttctataaacttgattggtggaatttgacgtcggctagtacgtatattgtggaatcctttgaagtttcgagctacacactaagaatgccggtaatagcataattcggaaagcagccaagtccgcaggaagattttcaacagctataagcgacatatctttctcttctacctcctattattggcagtgtccattattgagcggacatcatccctaatcaatcgtggccagacggtgtttgatgaagtccacaacgtcctgattgtatttccatatgtagccgtggtgtgcggcatttccgtcttcggggtatggtgagcagcattgttcatcaccgtaatcacaatagctgtgcattgagctagtaaatggtccacataaggctgggtttagccgaggaagaagctggtacatctgctttagattataattcagcacttgaatatgagttggtactcacgcctatacccagtgtgcaattgcccacattccacggcataccaggaaagtatgtctcatcaccatacgcaatcgcagctatgactagatatctgatcagactcgtgttttctgacagcctcgacatgacgtactagtcgagttgtaggtccgcgcaagaggggcgacgaagaggactccaacctcactggttccgcacagagaatccatcatgataactgctccctatgtggtagtgagccttggcattttgcatgtttgattgccataatacgatgtcaccattgaatatccaactaccacgatcttagtttgggggcagctttcactgtactcctgcacaaactgctgcatcagaagcgtaccgtcgtgaacagtatataatttgtccaaattagttaagacgtttccatgatcgtagggtaagccgagggttgtcgagccggggatctgcttcaggatcaggtctgaaagagtgctcattacattcagatcatcgcccccgccttgccccctagcgataatagcatgaacgcccgttgcacatttatcctctgacacagactgtgcgtgagtctgtatcaacatcagggtgacagctgacagtacccaaacgatctgtaggatcatattgtacatgttggagaatttgaagccacactcgagatccgacgtcactgatgatatgttgaagaatacgccaccatttgaacttctttgcttgtttttccttccttatgacttcggtgttgaatgaggaaatgcccgaatttgttgaccgttgctttattaaccctccgagcctacgtagtaccgatacatcagagggttttctaggccgcggtctgatgtgttttttatatgtgattggtgttatgttaaattctaattgtaggtgataagatgaaaaccttttctcgtacatattcgagaatgatacggaatgtcgaagtgtctatccatatccattttgaaagtacgatctacagccttggccttccatatctcagcttaattgcagtgcaggctttgcgtctcaccttggctagatattagagctcggatttgacctggagcgcaatcagtcagagttcccggtagtacacccgacgaaccataccggtgctttgggagagtaaaattctagttggaaagtctccaattgcgacaatacatgttttggagagaatattatcgcttgggaaagctggtgggtagcacatcatcctaattaggccatactcggcttaggctctactccatcaagagggcaagaggcaacgctagataacacttgagtgaataactatataggatgcattactatatatatcaagttcaaatcaaactatcttgcagaatatggcctttcagaatctggaacgcctcgagcccgagtttgtgtattcttcaacgggtcttttgctgtcataccgcgcacagaaaggcttcgtgcttcccatgaaccacaggcctcaattatacttgatatgctctgtcgattaggtctcgcacagcatttcccaactctgtgatgatcggaccagaccgaggaatggtgtggccccgtccagtgtcaaacatcgctgcggtatcaggatcacaaatattgaacaaggccaatgcgccgtatcggtaggggtctgtgccgaagataaacagtgagtatatagtttgaaaggggcaatagacgtcaaaattaccatctgcaccaaccacgtgaagcgtcggaatgtccagagtatagtcgctttcatctgccaggaccacgtcttcctcaggggaaagaggaggccagccggtgatgaaaatcgcgcatctgatgtgacgaggacgaccagtctcctgagcctttctatcctcatccaggattagacttgcagccatcgtagcaccctcactatatccgatgatgccgtcgatatcgggattcttctccagtgtatcatagaggtattccatgacttgatggtggtttatccaacggccatcccaaccgttacccaaagctcgcatcacatcttcgggacacgaaccatgcggagattttcgaacgcgagagatcattgagttctctgctactcctccatcctccaaccaccggtaatgcggcccgataccgaaatactccgtgaaccctaggaaaatatgataatcagaactgctttatcagtgtctaagcccaggaggacagtacctgctggtggagacacaagaacaggaccgttgatatagtggaacgaagcgaaaccatccgtggccatctgcttcactaggggatctgcaatattgtcagctggcccttcgagtcctcaaatgtgaatgatattaccaagctgaatattaatattctgtgataagcaagtcagtatggatttccattatggtgtctctgatcacctacgtcgatgttaccaatggcgccatgaagacataagaacctcatcttgtatcagtctgtaatgatctatgggaacgaaaagtaaaatatgggagaggtaacgagcaattatagaaaatatagaaatcaacatatactaggaaataaattaccgctcgggctgtacaagtcgtgtaaagcaaatggaagattgggaaagcacgggatttccgccgagcatcaacttcccaactacaaacaattgggatatcgaataatgtgggacggtacaacatttcagtcaaagtcaccaattcgggaataaccaccgatcacccaatgctagcagagcatcgatcgccttcggagtagagacagctccatgaagctgtacacccccaaaatgacccgtatcagaagagctggtgggtatttgcaaggctatataacacgccataacaacctaggcagtcggtttccccgatttccccgatttccccgatgtcgatgtggctccccaaaattatatagactcgcgtcacagttgcaccttctgcacttttcaccatgacaaacatgaagggtgctgattcggaaggtgcgtcctatggcgaccagggtaccctccaacctatcgccatcatcgggtattcctgccggctgccggggcaagttacatctcctagtgagctatgggagctatgtacccgagctcgaagtggctggtcacccatccccaaagaccgtttttctgtcgaagcattccatcatcccaattcatccaagattggttccttcaacccaaagggaggctacttccttgacgaggacattgcacagttcgatgctcctttcttcaacctcaccgtgcaggaagctacggccatggaccctcagcagcgcttgttactggagtgcgcgtatgaagctctggagagcgctggcatccccaaagagaattttgctcgccggaacgtgagcgtctttgcgggtggtaatttcgctgattatgagctcaataatgaccgtgataccgagactatccctatgcaccaagctacaggctgtgcggcctcgctgcaatccaaccgtatttcatacttcttcgatctacgaggacccagtgtcacagtggatacagcttgttcttcctcacttgttgctctccactatgcagtacagagcttgcgaagcggggaatccaaggaagcactcgttgctggttgtcaccttaacatcgtaccagatatttgggtttcgatgtccatgtcacagtatgtatttgcgtgtcctccaagccaagttggagatcatatgacctgactgtctggaatcatataggttgtttaatgatgagggtaaaaccttctccttcgacgagagagccacatccggttttgcgcgaggcgagggctctggtgtcgtgattttgaaacccctcgacgccgccttgcgtgacaaagatcccgtacgagctgtcgttgtacattcaggagtcaaccaggatggacgaacacagggaatcacattgccgaatggccaggcccaggaagagctaatccggcaggtctacaaagaggccaacatcaacccggacgaatgcggttttgtggagatgcatggaactggaacaaaggccggtgatcctatcgaagctgcagcagtccatgcagcacttggaaagaatcggactccaagaaacccactttacattggatcagtcaaatccaacattgggcatttggagggagccagtggtataattgccatcatcaaagcagccatgatgcttgatagagagctaatgcttccaaacgccgagttcaagaaagcgaatcctaatattcctatgagcgactggaatatgaaagttttaacgatgacgcggccatggcctcctcgcaagaaatatctcagcgtgtccaattacgggtttggaggaaccaatgcacatgccgtacttgaaaaagcaccactgtcatcaaaagccccagaccgagctgttgaggatgttgaagtggaccccaaacgcaagctgttcttgatctctgccaacgacaaggagtcactacgcactagaatcaaagacttcggtatctacttcgaacagcatcccgaggtttttgaaaagactctgttcggcaactttgcttataccctaggcaacaagatgtctcaactctcataccgtgttggcgtgtcagctacctcgctagatgaacttggtatccgtctcgcccaattgaatatcaacccctctagggttctgggagccccaataatttcgtttgtcttcactggtcaaggggctcaatgggcgcagatgggtgttcctcttatgcatgaatatcctgtctacgagttggccatcaaacgagcagatcaatgcctacgagatctcggcgccgagttctcccttgtcgaagagttggaaaaggacgcaaccgcttccgacattgactcccctcatctaagtcaaccagcgtgcacagcgcttcaaattgcactagtcaacctcctagaatcatggggaatccggcctggttcagtcgttggccacagttctggagaaatcagtgcagcctacgctgcggggatttatgacttagagggagctatggctctggcttactggcgtgggcaaatgacctcgttgcttaagtcctcgttcccgtcccttaaggggactatgattgctattggcacgagccgcgaaactattcagcctatactaaagaacctctctggatatgctaccgttgcttgcgtgaacagtcctaccagcgtgaccgtgtcaggagacatatccacgattagtgaactcgaaaaggttgtcgataataaacaacttttcaaccgaaaattgaagattgacgttgcctatcattccgaccacatgaagaaggtttccaaggcctacttagctgcgattgagaacattaggcacttctcgtcggcgataaccccattcttctcttctgtctttgggcgcttcgcggaaccctttgaacttggtccagaatactggattgcgaacctgacatcaccggttttattctctgatgctcttggcaagatagtggcggacgatgaaacacgacccagccttcttattgaaatcggtccacactccacaatgaaaggccccatcatggatactctaaagagcttgggtcccactgtctccaagattgcatatacaccaactattcttcgtaaagtgaatgcagctgagtccatcttagataccgctgctgctgcctacgtgcgaggcgctacgctcaatatgacagcagtgaactttcccaagaccggagcggcaaaccggtggttcttgagtaacttgcctcgctacccttggcaacatggaactcggtactggcacgttgcccgtattccacagaagcatatggtcagagatggtgctaggaacgatgtcttgggagtattggcaaattactcaaatgatctggagccaacgtggcggaacatcatccggttagatgaggttccctacctccgggaccacaagatgcaagggatggtcgtttaccccttagcaggctatgtaggtttaatggatgatccgcatatctaaataatgctgactgactgtccaatagttggtgatggccattgaggctgctcgacgacgcgcgaagcaagctgatattcaaatctcccagtttgaactcagggaggtcattgtgggctcagcgtttgtgcttagtgatgagacagatgcagagaccaccattactcttcgcccctacgctgagggtactcgtggatcatccgatctttgggatgagttccgtgtctgctcatggacttcaaagcgaggatggacagagcactgtactggacaggtacgggttcgctccgatccgaaacagcaggcagttgtgatctcgagtccgttcgagactcaagccacttacatgaaagctcaaatttcccgaattcagaaaccggctactaattacctcgatatgtcccacatgtaccaggttcttggtgatctaggagccgggtatggtcctatcttccagaatattgataactgctactccagccctcaccactcgtttggcgatctatacgttagaaatacccgcagtgtcatgccgaagggatttgagactcccttaactgtccacccgtcattcctcgatggactgctacattttgcttggccccttcttggccagggcttgggccgaatggatctggacacactttacatgcctacagtaatcaagcgtatgacagtcggtctcaatgtaccaaccaccgctggtgaatacctcaaaggttactgtagtggcagtcccagcttgccttcccctgaaccgaccaaatttgacctttttgccacccaggagggctctactgaacctattattacaatagatggcctggtaatgactcccctcagagattcagacactaaccgtgaagagactcgcaaattgtgctataagattagttggcatcctttggccgaggctgaaaacgccgttgaagaagatattcaagatcgcaacggccccgccgaatctcacggcgatacttatatccacggagacacaaatacgaatgggaatacaaagcaccaaggcaatgcgcacacaaatgagaatcccgtcaagcctaagcacgatctatgcattacgtactttggtaaatccgatggtattgctgataaattgagtattgccctgtccgacgaatccgggtggcaggtttccgtccggaactttggtgaagtgaacttctctcaaaagcaccttgttctacttcagactggagctagctctctgcgatacctcaccgaggatgtattcgaggggctcaagaaggcactactcaatgctagaactgtgctctgggtctatcggactgattctcccgatgctcaaatgacagtcggcttgactcgtaccttgcgctccgagacctcggctagaatagccactcttgggttggttcctgacatcaaatatcccgagaagcctatccaggcagctatcagtgctctatggcccaccgatggaactcagcccacgaaagatctcgagttcaaggccaagggctcggagctatttgtccaacgcatagtggaagatgattctgccaatagtttcatccacaatgagacccacgacatgacaatctcaacccaaccgttcagtcagcctgggcgccgcttcaagatccagatcggcagtcaaggctcccttgattccctctactttgtagacgacaatcccctaccattaggcgatggccaaattgagcttcaagttaaagcaaacggtcttaacttcaaagacattgtggtctctatgggccatcttgcacagccttatattggaattgaatgcagtggtgttgtctccagtgtaggttcaaatgtgaagaatttcaaggtcggtcaaagagtaatggccatgccagagggctgtttctcgacttatgcacgatgcgctgcgactagcgcgacagaaatcccagccgacatgtcattcgaggttgcagccaccgtgccagttgtattctgcactgcatactactctctgtttgacctaggtcatctccaagccggcgagcgggttttaatccacgccggtgctggaggtgtcggtcaagctgccataatgctagcacagatgatcggtgcagacatctttacaacaatcggaagcctcgacaagaaacagttcttaatggcccagtacggtattcccgaagaccgcatcttttatagtcgtgatacatctttcgctcgcagcatccgcagagccaccggcgatgttggtgtggatgtcatcgtcaactccctggcaggcgaacttttgcgcgagacttgggagtgtcttgcacctttcggaaggtttgtcgagatcggcaaggctgatatcacgaagaatactcgccttgacatgcagccctttgagcacaacgtcatattctcgtcggttgatctcaccaaggttggcaagtccaagcctcagctgatgaagcgcatcctgggtgatatatgtcggttgattggtgacgggtcggtgcatcccgtcctaccactttcgatttatcgaatttccgatatcgagaaggcattccgtactctacagatcggcaagagtatgggtaagattgtggtggctcctcatgaaggtgaccaagtcaaggtaaacaaagcacatccgcgattaaatttcagatctaatcgttcatttttcaggctgtggctcccaagaccagtgccactctcttacgacccgatgcatcctacatcttgattggtggtactggtggtctaggccgaagcatggccaagtggatgtcctcgaaaggtgcaaagaacattgttcttgtgtctcgtcaagccgcgattaatgagacggttcgaactttgatagatactttggctcctctaggagtgcgaattatcgtcaaggcttgcgatgtcagcagccgtgagtctgtcaaggctctgattaacgaagagatgaaagaccttcccccaatacgtggtgttattcacggtgcgatggtgcttcgtgtaagattttactatgatgacttatttacattatctgttttcattactgaccctacttaggatatgctcttcgaaaatatgtctcttgaagacttctctgccgtagcgtgcaacaaggtagaaggagcttggaatctgcatcacgcgctgatcaattccccactggatttcttcattgccctctcatcgatagccggcatcatcggcaatcgcggacaggcagcatattccgcagcaaatgcattcctggatggattcatagaataccgcagatcccttggtctttcaggaacatcaatcgacctcgctgcagtcagcgacgtcggctacctagccgataccgacgcccagcggcgacaggaggtaatgaagaatatcagctgtcagaccattgacgagtcggaagtcttggcgttgatagccgccgcgttaaccggtgatcttgatcgatcctgctctgggcagtgtgtcacgggactgggactggattcactcgagaacaacttctgggtccaggatgcgaggttcagcgtgctatatgaggccgccaaggggacgctgggcaacagcgcacagtgcaacggcccgtctgtgccgctgcatgtcaccttgtcgactgccccatctaaaaaagaagccttgagagcgtgctacgaggcgctggctgcgaagttagcgcaggtgcttgttctctccttggaggatatggatccctcgattacagtggtttcattgggtcttgactcgctggtggctattgagattcgtaattggattgcccgtgaggctaatgccaatgtgcaggttctagagttgttgtctagtggcagtttgatggccttggccgagattatcctcaacaaatctcaggcctatactcgcactgagtaagatgatgatagcgtggagtgctgcggcggtatacgagccgttagaaatgatatatatattttacatgttgaatcctgattatttgcagattgttttcatttggaatttgaagccgcatcatttctccatatgttgtactttatataatagtaactataacgacgtacaagatacacagggcaaccgagatgagatgtctaacatcctagtagaaatttgctgctatgtatgcaataagagcccgagaagaataggaatgacaggagtataatagcgccagttcatgtggtattttaggcttgatttcacatataggtgaagtaaagaaaaatgcaccagctcggggaatagacgaaacgaatggataaatcaaacatgcctccatgagtttgagataacatgaaacccattaacaaaaaatgagaggaagaacgaagccgaactccaggaacaaagcgcaagagaaacccattgaaatacccatgtggattccaagaaccagaaacgccttggtgatgctaaacaattcgactgagaaagacaaggaagaagaacgctctctccacaactcccatccgggaatgcccatgcagatgagaaaaaaaaaaggtcacggaaacccatcgcataccatgcgccgacggaccgatggacatggataaaaagaaaatcacaacgaaagagacagctagagatctatgctccacgtaagattcatgtatcactcatatttagtgctgagtggagttcccagcaacggacacagccactgcgactgcggcgccgagaatggcactttcaggcgcagggttgaggcgaatggagcatccggcgcccgggtaggttgcctccgccagctcattcagatagttctggcaggcagcgcggaagccaggatacttgttgatgacagcgccgtcgcaagcgatggaaaggctcttgtccgagtctccgttttcgatgacggtgattgcgggtgattccttatcgagagagtcgacggtggatggggtcgcggggaattccacctcgttgcggaggcaccacatactgtggatggctgtcgccaggtagccagcagcacggcgggagactgtctgggagatgcgacgcaggaatcgcaggtcctcgacggagggttgtttgtggaaggtatgctgcttttgcaggagcgcggcggcggtggaaagggaggcagaggagtcttcctcgaggcaggcgacgatgcttgtgtcgaatgaatagggttcacacatggagtgtggtaactcgccgccgaacaggcgggcactctcggtagcctcgacgatgatcaaacgcacaatctcgcccaggtatcgacctgtaatcatgtactcgagcggctggtagtcgggacgcagatgggcgctgttcagtatgtcatcccaccgtgtcataggcagcacgcctccgccaaacatactcatctctgtattgatcagaacatgcttggcgtggtcgaaccagccctcgggacgcactccaaacttggacattccaatctcgtgcaccgggaagtgaatcgccatgttggtaccggtacccaaaatgagagacatgcgggtcttgggatcgacgtaggcacgcgagagtagagctgccgagctgtcgttcaggatagcggcaacctctacgttcagattgcgcttgcggcatgactggataaggatatcacccagttccttgcctacagtgccattggaggccttgaatcccttacccatggggagcaccaatccgctgctgtgcgaggtctgttcaatggggaaagaccaggacaaccccaccaccagcggtacgtcgccacgcccgtagtctgttccaacttcttgcaggacagtttcaatctgccctgccatccagtcgaaaaattgtgtcccttccagcatcttgagttgttcgtcgatgtataccgatgatactttcaagatgcgcagctcctcatcccggccattcaactcaatcaaagctacgcgaaacgtcgatccgcccacgtccaatgccagatatgtgcccttttccgagccagcgggaagcgcggtatcgtaggatggaagcatgcagcatgggctagtttgtaaacattctcggatctgtgcacgaatcttctcggacatgttgaccatgttgtgtgttgacagcggcgttgagcacgaggtttctacttcttcggcgaagttgtctaggctgcggcgtttccaatgggcgccgaggaaagtctttcggcggcgtcgcgaaaggccacggaagagtgaggggaataggatcatggtttcgagtgcggtgaccacgttatggaacaactcttgcaatcggtgtagcaccttgaccagtggcgccgacatagtcggggaaggaagatggaggagaggcggggtcgcgaaccgggggcgagggatggatgttcactataatgaagtatagaggatcatgaagcaaatgagatagaagaagaaagccctgaagttataacgttaagaaggttggggggggccaagccgatgtgacactcccactggagttgtgtcttgagtggatcggtgggagtgtggacgcaataatccccaccgggagaaagtggaaaggagaaggcagaagagaagagaagagggaaaagaagggtgttgacccaaagcatggatcaacattggcccattcttgagttgacagtgtcaccgcgagtgcaactgtttgggaaaaggaagcccttgcggtgtcgcaatccactgggtatggtactgtaacggtaatttatatgttgtggatagctggggttttatctaggggattgtgcttataccggagtcatattaaaaggcccattaaggaaagctatcttgtgccatttctatccagtctatatatcctaatatcatatatatcacacccgtcgcagctgtagtcggggtggtggagtgaagtggagttacattgtgactatattgtgtattttataggagaaccagaatagtgtaatagtattaatagataagttatactacttcctctacggccgaatatacgcagatagaggaagtatttccaatcattgctaatgtgccaaataatagaatagaatacgagcacaggcattcccaatgtacccatacatactcaatgacccccttgagtgcaacggtggtagtcggctcaactggggggtgggggacggttacatgtggaactaaatcttctacttaactcgcctctcttcttgcattttccccctggaaaacacatcttcagcttattctagcccttttcccccctcttagcaatctgattctgaaacatctatccgatccaataccctaatctaggtattctgctctgcattgcaagcgttgcaaccctatctctcgtcggatatatccgcctacaatcttatatctgtagaattatagtgttatctggcacctggatgtagccaactagattttacccctgtcaccctgttacggcagggggcaaggggnnnnnnnnnnnnnnnnnnnnnnnnnnnnnnnnnnnnnnnnnnnnnnnnnnnnnnnnnnnnnnnnnnnnnnnnnnnnnnnnnnnnnnnnnnnnnnnnnnnnnnnnnnnnnnnnnnnnnnnnnnnnnnnnnnnnnnnnnnnaggggggtcctccctttgagcctcatcaaccacgtagcgtcgacgatgctgtctacggcccgggcgtatcaaccactattgatcacgatgataccttccagagtccaaaataataaaatctccgactttgctggcgacgtttcagtatgctgccatgacatcaccgatggtgcaagtatcacatcatacccatcagtaaagcaagggtaaaaggcaacctggtgatggacaatctctgtggctcctcgtgccatctttaggtctcaacaagattgtgattatgtcagttgaggagatacaggacaagaacggcaaggatatcactgaaggtgactttgtctacaccaagtacagaggcgggtcacatgagggcaaggtaggattcccataacaaatctttcgtttgtgctcaagtcctacggcacaaatgacccgtaagtaggtcgaaatgatcatcagagatcaagctagtgcccaacaagaaggtgtggccagctaccctaaggcaagtcctcagcgagaccagttccccacgtcgtggctaatccgtgcacgttataggtcatctacaccgatcaacatggtcatcgagtcgctcataatccgatcactctaacaaagcaaaacagaagtgcagctgaatgactaagaatgtgtggttggcataaaaggaatacccatggcatagttgacgttgtggggtttcgtagttagggctcctagaacaacaatgagcacaatctcttactatccatgtctataatgttcaaaggctagtatatagattccattcattctagtccttatcaacaatctctttattatatctttgaatctgcagattatcgcagtgtcggatggctccgcgataccctttatgttccaagataatcttgtctacattatctcttcattctttatgtgcctttcagtttccattggtgacatctgattctcattgttctattcatttttctcttgtagtaagatgccggagttggcatatgttttccctggtcatagactaaaaaaaaggtatatcaacgacgtgacagtccatattctttcccgccccacattcagcagcaaattgcaagcccaaaattcaaaagtgcagtactcaatcaagcattttgataaaatatccactcattagtcatgcccgacactattactacccaaccaccaggggaacagcctccaccattgaagtatgacaggcttcaaacgacaggggccctaagggcttcgtggataagagaccccaaccaaatctgtccaattgccccctcgcagctcacaatgcaaaacatggaagaagcaggatggggaatccggcaccaaaaacgacacttcccacccgaccaaatctacgaagaaaccgtcgaactaggtctttccggcgagaagctctaccgcaagatcgtactatggaagtccggagtatcgcctggacagtactgggtgaatgactatatgttacaaacagggccaggcgtaattttcgccatggatagcttccggcctgactccgcatattgggcgcaaattgcgcaggccgtttatcaggatgagcacttcttggaggacctgaagtatgtcttccagtacaatattattaatcctgagactatgctgtttgtgcagaagagtctctatgtcgcagcgaacggtcttgtttggccagatgatagacttcatgtctgggaggagaacaccgctgagtatcaggctctactgggtacaaggctcgccaagggtgtcgcgtatttggttctagcggctttcccgcgaggaacgagacgtattgcgaggatcgtgacttggggaggtcgttatataccctacgtacagatgcggtttgatattgagaaggtttgatttgggagatgtgtttgagggttggtagaatttttggcacgaacaatatcatagtaatggaatatagtatttgcccaggtcatcatacaaaggctaaaagttcgtcgattgtaccggggaagacggccattacagatgtccggacttactgtagagctttattctgtggtcccacatctctacttgtgacgcagtgtatccgtgtatggctcactttgaaagatctgcgggcccccggtcccatcatgcatgattatgtcaagagccagcgcccatgcaaggggtttgtacaaagttcaaaacgatcttgtgggtataccccgccagtggacgtagcacacattaaccggaggttgacattaattgagtatgaacgccgcgcacgtcgcccaatatatccgagccgttgggccagcgatgcgcggaaggaacttgttcaagttcgaataaattgttgtcgtgactcgtgagcacgtaggcggaatcgcctccgtttgcacgcagcatgcggataacatactttcccatctctgctagattagagccggtatgcaagtcacccaccccggcgccggacgaaacgaagcttctcccgtgccgtgagagtacggactgatggcgacatactcggcgttcatctgtgcgtcaaagagcaatggcgagattgaagaattaagaaagtcaatatatcatggtactacctagacatcttgaaggtttttatgtaaggagaagaaagcatgtgattttcaacatatcgcgccttccctcttctcgtcctttccttggcacaccgccgtgcaatccgacagccttagagttctccgtctcttttctttctctttgctctctttatactaaccggataccaaaagagagctggaagagaagcaaaagacatcctaaggagaagggatccatacgcgaatgagcacaactggtcatgtcgaggtggtgacccaacctttaccaccagtggatataagtcacctcacaaactttcaatcgacgtatttgaattggtggtaaattcgtttattcagatgaaacatccaccgaggaagcgaaaggaatccatcgacacaacaactcgtcctattgtccatgtgacggactccgggcgagcgaaacagaaaatataacaccgcttcttaaccagtaagactgccaccgtcacactagcatctaggtagggatcaagtactcctatctcacgagtcacgactggaatcgttcgtgttcttctgcgttccacgccaagaccgaacataccatgcggggcatctatgccggctggatctttagcatgtgtgtcagcaggcctgccgccagccctacagccgaaggaactgcttggacctgagggttcgttgcttatgtcgggcgctagttgactagcatgccatggccgaaccacccatgggtacgcgtcgcggagcgctaagataggacgcagagaacagatcgtagtattttcgtgggttgaggtacattttatattccgtagtagactgtaattacttggatagaatctctggtcggagtagcggaattaggagaaacccctgaccagtccatccttatcggcttcggatagaatgccaagacatcccctgaatgatcttctgtcaatcaaatcggtgataatgggcggattcagttgcatggtacttaaggcaaagtagaccgactccgagatgcaggccacgccatcataccagtcttctagcgaccgcagactgaatacatatccacgatgtcggaaataaaatatacgagaggagaagaactccgctgtgggaacgacaaccgacggcgttggcgatgtgataggacaacggcacttgtcagctccactcgacggaaatgccaagacatttcattacgttgctcggcgcggccctctgtctcctctctttggcttctctttggcttctctcggcgggttgttttgatcttaaatttaattaaatggcttttctattctcttgatcctcttatttgcctagcgctgtcgtttgccccccgctctttactcatgccactgacgacgactgtctatatgttgtggtgtctagcggctcttatgtagctttgtcgcgccccatttattctctttttactttcttttattatattcaggaatctacgcttcctagccattctttaacatctaatcatgctttgggcagctgcattactcctgttctcaggtaatgccgttgcagagcgtcatgactcggatttgttgtcgtttgtgacggtgggttgaactttgacattgttggaatcgtgtggttctaatagccaaaatccagcttcctgaggtccgagccttaaaatgggaggttgaataccacgaccgcgagcggttggcccccggttactggttcgttgcgccatatgggaaaatctccccagatcaacccaccctgaaatatcagcaataccaagtcggaccctacatttacgacgacagtggcgtatgtcttgttcccgaaacaaatcaaaaagcaccagctgactcccttctggtaacaggtccttatctgggccggagcacccttgtacgacaatcataatgtcttcgatttcaagccggtgtataacattgacaacgacccttatctgtcgttcatcgtgggctgggaattcgatgattccaagaagggccacggcgcgattgtaaaccaccattacgaggtggaaaaagaggtccaggctctgagtgatgtccacgacttcaacatgcacgaattcaacattatggacggtgggaagactgccctggcttgcacatatcgtgtccagctcatcaatttggctgatttcggacgcccaacggaagagagttatgtcacggttggtgggttcgttgaggtggatatcgaaaccagcaaggttctgttccagtgggattcattcgacaaggttgctctgcacgaatccaacatgttccatgcctcggatcacccagctggatcgcccggttgggattacgtacatatcaatgcggtcgacaagaacaaggccggtgactacctaatctcattgcgcttcacagataccatttacttgatttctggccaggatggaaacatcgtgtggcgcttaggtggacacgaaagcgacttcgagcaggacttcaccttctccaagcagcacgatgtcaagtttgtctcatcgaacggcactcaccacgttatctcattcctaaacaatgcctccgacgaacgtggctctgacgagagggtctcctccgttttgttcattgagctagacacaagtgttgtccctatgacggccaaggtgattaagcgaatcaatcgccccgatagtggcctcacccgactccgtggtagcgctcgcccccttcctaacggcaacgtctttatcgggtggagcgagcgcggttactcgagcgagcacgcatcaaacggcgaacttctaatgaccgccaggtttgcatcagaccgatactcaacttaccgctcttacaagggcgagttcactggtcgacccaccgcgcctcccgatctagtcgcatccgtctacggtacccacgatgaggatatgacgaccatcattcacgtcagctggaacggcgcgacggacgtcgtccagtggaagttctacgcgcaggcctacgaccgcggccagcccgtgctcatcggcactatcaacaaaaccgacttcgagaccatgttcatcgccgatggctatatggattttgtttccgcggaggccatcgatgccgagggcaatgtcatgcacacttctgagatcatgcgcactcaatccccatccgactggaaagcggctggctgggtcggttctgactctggtcctacttatgatgacccgtcaatcattgtcgctgccaacgctcacacggattcgacggctgagagtaccagcgacgaagcggccgaattgatcaacgacagtacctccaccgtctccggcgatcattcaagcgcccaatacgccgatgcgaaggaggtcgccaaggccgtctacaaggcctacgaggtcatccgcggagtcggcgctctccttatcttcatccttttagctggcactttaggtggaactggattcgctctctggcgacatgtccgcgccggccatttcggccgctaccagcacgtcccctctgaggagggtctccccgtggaagaaatccgtctcacttccaacccgcagtcttgaatgtttgacattttttcgctttcaatcttcattgttagcgctacatcttgccccgtttcgcaattgcaatgtttcgaatcaccaaaccgagcttacaaatttgcaaccacgaggaagcgaaaggaacagaaaaagaaaaaaaaaaaaagagaggttagctgcggccatttggtatacaccattctggtcacgatcgtttcatgcatatcatacccccatctggcgttattttgattgcgttctttctatatatctaccatcaggctgcgcttgagtgacgtttctgcatgcatatctttgattgtttagatcctgttttccttggggacccaagctgacctctgtacattcttcttctcattctatgtaatatcacaacccgagattcatttcgcttgacgaaatccatgtctctgtatataatgtgaacctcgaatttagaacatatcatcccgatgcccccttctttgtccaatttatacgccacagttacataatcgtccacatttgcgacttttctccctcggggcgaacgggaaatgtggcggtggagcagacgatggaaataacattggatcggttcgcccggagttatacaattcaatcagggagaagagtcgataaatgaaacaattagcgcggcatgaggctgacgctgacgacgaaatgttcctaaatcgggaggccgcgtcaccgtttgcactggcgcggatataacggatctatgtggcgttgcgtttaatgcgtagatatttatgccggaatagatagattagattaggtttacagagtggattaaatactttttctctacgaagtagaagaggggatgagacttgctctggtacggagcatgcgaactatatatctcgggcggtcactcactccgaactaccaatccttcaagttgaatgattattctctagtaaatgattttctttgttctcttctgggatttatgagtgattttcttccatatgctagctgtcaagcgcaaagcatgaaaccctaggccctctatatgaagtattatacattgaatatatggaacacagatcaatgaactaaaacctaacaatctgaccctttgcaaacccaagcctagccaaaatacccatttggcatctcgatccaaccaacgaatcctccatagcaggaggcccacaaacaaagaccttcgcatcgccatcggccttcacaacctcccgcaacagcccctcggtaatataccccgtcctgaacccatcactccgtccctccgggtgactgactgcatagacatagtcaaagcgacctgggaagcgcgtcttgaagctctccagctcttctcgcagaagcaggtcctgctcggtattgacgccaaagacaaggttgattttagttttgtcggctggattattgagaataccctgcgctagctggtagattggtgtaatacctgctccgcctgctatgaggtagacctgcggggattggttcggtgtccaggcgtggcctttgagtgccgttgcgaatgtgagggtgtctcctggtgaaagggagtggatgtggctgctcgctttgccgtttgggtatttcttgaccatgagctcgatctggccttcttggtctattgttctcttttgttagtctatcgttatgtcgggcttgggtttattactcgtacttagatcgctgatgggtgtatatgggcgtagtacggggaaccagcgtccttcgggacgggatatggtgaggagtgccgctgcagtatgttagtatataagctgttatagaacgttgatcgtaagtcgggtccatacaagttaatgccaatccgcttgtggccttctgatctggaaactcgaagacgagccgttttgtgttgtgatttacatctttcgtgctttgcaggcgtaaggtagtaaatccgaatcctgaaaagactttgggaggttcatttgactctgcattggcagttgatataagacgcgattggacacagtaagctccgatgcctagtaaagtggcagccgaggctgattttgctgttatggactgggggaaacgagttttgaacatggtgaaaattaaatcttggaattattcattgcattacggctatatcaactgggttaatatagtactctcaaattgaggtggtttacttctaacccgcgcctaaaacccgaggcccgtccaaaacccgcagaacccgtaatgagtcccgaccaccgacatgacaatctatgattctatacccagcagactgggagccccatatgatctacaactgattactccatactcttatatagttcggccttttccggaacccaatgggaagttggggttatatctttagtccaggataaaacgacgccattgaaatcaactcgcagtaattttgccacgtattagaaatttgatcaatttgtttggggcatatttaaatgacttcataatcttgagtagatcaacgaaatagcttcggcgccagcgtcgagcaaaatggatatctgagaggctaacggcgcatgcaaaaaaaagagagaaaagagaaagacaacaaataaaaccaggcaacgatcttatctcgtctccgatgtcctcattctttctgaggaacagcttgagcctgttgtataaagctcgccttgcctgtcacttcgttgtaaatattgtacccatagtcggcagcattaggaggggtatacactaggaagctcgtcaacatttgcttcccatttcgatctcatattcagcacttacagtgaagagagacggcaacttggtcagcactcgggttatgaacacggtgcagcccgatatcatccgagatataagcgacgtcattcatggtatgtctcgtatcagacttgatctccaacggaccacgaagattagagtcctgatctgggacggtgtagatagtctcttgaagcgtcccagctaagatcttcatgatgcagtgtgcattggcgtggtcgtggacgggagagcctttcccggggttccatacaaggaggagctggaaggggttagtctctaattctttctcgttgacagtatctctataggattagaatagaactcacaatatttgctttctggtttatgttctcaatggcattgcgggtataattcttgctggtatcgttgtagaaaaagcgggcccagtcgttcggatcagaggtatatttctgcgccagcgagatcaggtattcattgtccacgtctgccgatgaaataccgccactctcgcctaggtagatcttgatgtcttgtatgagatcatcgaggctgtattgaggtttgtagtgcttgttgcctagtgatgagctggtgccaagcgggagtaagggaatgacagcggacatggtggatgttttgacgttggaaggggatagatattcttggaaggtaatgagaagttatgaagaggattcatggatgagttatatgaattcatatctgtttcccctgtcccccgtgcgatcggatctcaatcggcgattgatccgatgtctcgcattccagcgtcctagaccgattacaatctcgcctgatagtcccaaaggtctgaacatgtgcttctagattagtaggctatgttgaaaaaaaggaggtgctgaaaaaggaggtgctaagaatgatagaatctgtaaaatccgctctattcacaataccctacaagacttgaatagaacttcaaacaatctagatattttttagaccaactctcaatattttgattaaatatctctaatctctctcaaggttccaagttctaatccaaaagaccattgatgggagagaaaactaaacacataacgccataacgagaacatccaacgcaatagctgcagttcaaccacccagtactctcgtgtgatttatgatgtaagagtcgtagcctagcatgcacaccaacgtatcggcgaacaagttaaacatgaagtagatccctatgtcattaactgcgtgaatgtgaatacacagatggttatcacggttatcgccggactctatcacgagagacccaacagaggaatagtcggtgagtattctggccttatctcccgacgtatcattgtgtgagtgaaaagcgcatgagattatacaccgtacaatcggaccttggtttgtagaacgaacacgaactagtcgtcgcacatgatggggtgctatgcgtggctcccgactggaacaccgggtggagttcaacgggccaatcagatatctgagatcggcagcacagtcggcgactcaacgaaaaagcccaatcggcgtttgacatgtctacgacattatcgaaggattcatgtttgaaccccctatcatagctattacgtgtccttggcatttacttaatcaaggccgagatctaatgcgcaaccttctacatgacgaggccagctgacgtttaccccagaaaccgttaggtaaaatgacatcggccgtaataagttctttataactggctcccgggtataaccgatctaattaatatcaaagtcagggatagcgctgaaaaacgaagtgttgtaacaagttggatcgatgaatgcgagggaaaactccggcggcatgaaatcatgtccgtctggcatagctggaggaggattgccactagagctgggtctttcttggtcattaggcgttgtggctgccggggtgggtcgatgtagtggttctgaattccattttcccatcgaatccgataagacttccgctgcagaagatcgaagagcatggtataaggactcggccaatttccatgtccgctgggtgctcttgagacagcctagaatgagtgtgacacggttgcagtgatgatcaaaacactcctcggaatgactggtggacgtggcgagctggataagtccacagagggtcaaggcggggatgctgaagggggtgtgcttcgagacgtttggacaaacagatatggaatcggagatccgcctcgaggcctctgttgctttgatactatggactagacgagtgaatgttgatgagagctggccagtcaggccaggccaaaagcgatcatctggttgggagtgggacaatacagatggaaggtcacttcggggtaagtgtaggagcatggcggcgtaggctattgtcaaatgcgcttgaaacatcatttcgtcaacgttgccgtatgaatcaacaatgtcgagcttcttgggcggcaggtggttgatccagctcactagtgcattttcgacagcctggagatgatcgcggtgacagtcgcgtaatcggttcaggacaagaacccggcatagtattgtcgtggcctcgatacggtagctgaatgatgaaaagacggtatcctctgctgcgaggatcctccgtttgaactcaatcatcatacgtggttttgggatatcacccgcacaattatatgctgactcttcgcagggcaaggccacctccggtgacacagtgctacatcgaaatgtcgtggttttgagtgggaccgccatgaagatatcggtgacgtatagttcccaccatgttcgtctcatgctttcggcctcaagagatctttcgggatttgtggatgaagcgaatgaccaacggttcatgccaagctccaacgcaatatcaatactatgggagagagcatcttgcgcctcgtcccattcatcacgggcatacagagcaatggagtatagtagccaagcctggaccatggaagctgaccgatcagggtttgtctttaactcagcaacgacttgttctttgtatggctgactcggaatagacgtaatatagtgagagcccacaaaatgcacagttagctgtaagaagtgagggtaattgtggtcgtgatacaaggagctgggcaccaagattggatgggcgacatgaaaattttcataatacaaccgaggcaggcgatcgtcatggagcgacaattttcttgttgaccccacagtttgctgagtaggagcattgtctgaaagcatcactggccaagagaccggctcagtggtaatatcgagccctgcctgcctgcctgcttgcgccgagggattctctggtgtctgtgcaggtgctattggcagaacaggaaccgtagattgatatcgagtctatgattaatttagtaaaaaaaaaaccatcaagtagaatcgtcaggactgacattgacatgggtttgcgggtggcgttggtatggactctcaagtcgtgatttcctgcgtccgccccgtcgggagggtagatattgacagagcaatccattttgaacacaccgcgaacatgatggtttactggcgtcacatttgagatgctgctttctgcattcagtacaggccagtgaggctagaccacttgttttcgttgatctcgttggagtcatgcttagaaatggtagaatgaagggttgacgtttcaatccccggggctatcggcgtttggcgggcggtcggccggggcattccctgtgtacttcgcatgagaattggttaaaatccctaaaatgctatagatatttgatcatttcatatcagaaattatctttccacaagatcaaagggatatttgcgaacagattttttgcgtgtcatttggggactattggaaggaccatcacgtgtcaatagcacttgcctcttccgagacgtgctactgcttcctgcaactactaccggcattgatcaagatatataccagacatcaaggacatcgcattcatataaaggccgttacctacaattcaaatagcccaatcttcataacccttgggaactctccgatttgctcttgatcaagccaatcaaaagttcgttccggctttcttcaacctctttcaagtcgacgtgcgatacccactcattcactctctctttaagaacgtcgacatcttgagaatcgatgtcaaatttatgctggtgcatgtcaaccaaccatgttttgaacgccggccccaggtgatcgatgaaatgattgaagtctccaccacccccaagagtgttggtcatgataggtccattcaaagcccaacgaaggccaaggccagatgtcacggttttgtctaatgatcaagtcagaacacgtcaaaaacattctatcaaacgggtaatactaaccaaggtcttcagctgagacgattcctctcgcgatgaggctataggcttcagcacaaatagcggcttgaagccggttcgcgataaacccgggggtctctttattgacgagcactggatctttgcctaggcttccgtagaactgaagcgcagccgtcacgtacacatgacccgttcctgggtggggaactacctctactaggggcactaggtgtggagggttgaagggatggccgatcagaatacgggctgcgtttctcttgcattcagtgacaaactccgacgaagggatgccggaggacgacgatgcgataatcacgttctccggggtgtttgcgtccaaatgagccaaaagacggcgtttaaagtccagcctctccggtccattcttatgttgaaaggtcgatcagcaccaaccatgaagagacctctttttgcaatggctaactcacttcttgtattagatctaattcaccaagatgaggatcgattttctcgacaaatttgaaattgttcaagtaatcgctttgtgtcaccttgacatcgggtatgcttgaccaatgctttatcaaataatcacggagtttgccctcagctcctggcgccgggtccgtcacaatgaccttcagacccttagccaggaacagtgccgtccaactagagccgatcacaccggttccgatcacaccgacagttttaatggaaggacgagccatgattttagacttgcgaagcgtttatttcgatctcttcgtttgaattgagattctatagaaattggctatgcgtacagtgaggctaataaatagtatatgaacccctcgaggagacagagacggagcaagttactcaagaggaaccggagtcggcatgccgaatcgggaagaaacgcttcccggaaatgcttccgagatttcgaagagtcagccaatattctgcacagtgccgggttccgggacgtccggggtggttctactctgaatgacgaaccttctttaacgaactcccatctatcctcagggaaaacttcgatatttgtctctcgccatttttatcttttcgatctagctgtcactttgggctgctcatgtccaatattagtaatcctacaaagataggtatggattaaaaagttcaaaggttctatctcatctattataaggccgacgaagctcaatgatctgctggggcgaacgacgccccactgttatggagtatggagtacatacagtatgtatgtaccggataatgcctggaacttgaaacctttcccttttcgtttgagggctcacctcttactgctttttgatcaccgagtaaaactgagcacgttcctgggtaccctgacttgatcacgggctattattgcgaagcgaagcaaatataaatcaaaaggtctcacgtacgtgtcacgtggccaagttttctcctaggggggctgaaacaatagcgtttgggaatatagaaccatctttgcactcctagcttttctctttggctctctcccggtgtgtggtcattggaacgctgaggaggtttgctctctgagatttagctatctggcaatttttattgcggtgggactattgggcttgaagggctatgccatttacctggggcgaaagctcgaaaaaggacggatagtcgcgaaaggctcaacttaggtagttctgatctttgcttgtacgctggaatcaatttgacaatgtctaaacttaccactgttttagccctcacagctcaaataggaaagaccggtaacgtaattcacaagcgagccggccaccccaaaacatatagtaaatgcgattaattacaactcgatatatcaacaacagtagtttatatggagatttccttatggattattgctttttaagtcatatctagtatatttagggagttgaggaaaagttgataccttgatggttgcgttgtatatacttctagcttttggcaacgtaattttcggtattttttgaaatcattacagaatagccttctgcttgctttaatattgatatatagtgttagcaaaccttatcgattactatcgagaaataaggagataaaataaaaatatagttgttgagatataaatgtagaatatatcgcatttactatggtgtttgggggtggctggctggcttgtgtggccggctggcttgtgaattacgttaacgtaattcccggccgagctgcgcacccgggcgagctgcgcagcccagaacacatagtaaaagcgataaattacaacatgataattcaacaacggtactttatatgagcttttccttctagtctaatgctttttatctgatatctagccacttattggagtttaaagggatttaataaattgatgactgagatatatatatttccagggttcagcgacgtatttttcgataccgtaataatggaagaactcgatttatccaaaactgatatataatactgtaaatacttatcaattgctatcggtgagtaatgaaattaaataagagcgttagttgttgaaatatcatattgtaatttgtcgcttttactatgtgttttgggctgcgcagctcgcccgggaattacgttagttacgtatagccgttaactttcagcataaggggtttgcacaacttagggcgatcacgtgttttggcacttccggtgccatttctggccttccggccttgggagcttccgagcctcggagatcatatctctcactaattgttgtctgtgacgtacaaggggatataaatacttcgcgactttagagatgtgatgtgaagctgcacgtccagattactttgtccttctctattctaaatcttcaacatcctactgaattcacaatgcctcatccacacaaaaccaccccgagcaccgatatctacggtcctgggagtttcatggatacggagttcactccagttccccaggatactgctcgaatttttgagtatcttgcaaagaacactcctgggttcactcaagacaaagagctttggaatacagtcaagtttaatggtagcgaactaccgatcattcctggtccaatcaaggcccctctcattgcagctgccctacatgccatgtgtggagttgtagcccacgaaattgtcgaaggtcgtgatggcacatcggcacgtacccagcaggtcaccgtcaacaccgatcatgctgctatctggttgggaaatatttttgcggcttccgtcgaagggaaagacgtgcctgaactgttaaggtcgcgtcaactgtcagctcttttcccgcaggatttcgagcacggctgtatgtccacaccgataaaacaacgaactactgctatctacaagacaaagacgccgggggtttcgtatcaacttcacggttctcttgatcccatgccagtcctgcaatccatgggaatggatcctaattaccctgccaagacgttcgatgaagcttatgactacatcagccggcatgtcgagcaatggaccgcagacgagttggaaatgcataacgtcaagaacgggttttgcggcagcatctgctttacaccccaagggtggttagacacgctgatgggaaagacccttgcgagtcacccactagtcggctactctcgacagtcgcatgcaattccgactcctccaattcccttgcctaatatctcggacgataagcggcccctagcaggtatcaaagtgattgagctggttcgcatcattgccggtcctgtcattggctccaccctcgctgctttcggtgccgatgtcattcgcgtgaactgcagccgcttggtagaccttaatgtatgtcgtgaattctggccttcaaacttctttatactgactgataatgtgtataggctttacaacttaccctaaacatagggaaacgcactatcgatattgatctgaccaaggacgaagataaggcacgactgcgggaactcattgagggtgccgatgttttcgttcaaggcttccgccccaatgcaatcgcaagaaagggcttcggcgtcaacgatctcctcgagatggccggaaaccgtggtaaggggatagtgtacgtcgaggagaactgttacggctccgacgggccttaccatgaacgacctggctggcagcagattggggatgcagcctcaggatcgtcctacgtgatgggccggtctttaggccatacggatggtttgggcattcttccaccgcttccaatctctgatatgaccactggtcttgtgggtgctgtgggggctcttatggctctccgggatcgggctcaacatggtggctcatatcgtgtgacaagctctttggtgaaggcagatgcgatttcactggagcccgagattggtctttactcgccggaggttgttgaacggagcaatcagctgttcaaatgggatcccatcagccctgcctattttgtcgcggagatccttctcatcgtcatggatggatggaagagagttttccctcaatattttgaagaatctggaactgaatcgctcatgaccagtttccaagatgggccatttggccacatgaccaccctgaagcctgtggtccagttgagcgattcgagcatgacaccgcggtggttgacacccgcggttccctactgttatcatcctcaaaacatagaatggctgtaacttgctcctcggaggggtctatcatgtgattctaatagtggtggacagatttggcgattgaaattcgagtgcgagttcatttgccaatacttggggatgatcttgtgatctggagcaggcatgaggattgcaatacaaagtgttcgagtcagttggcagtgaatgtgtgagaggccgataagtttcggttttcatgcctagtttccctcgcccatgtatcttctcccatgcatttttaattctatcactataatacaaagaatattcatgttagggccaagcgtatatagagacaaaggactcgacaacacagataaaataactatattctcatacagggacactctccatggatcagcgcaaatcacaccgtggtctcctactaatctggtagacttcagcccatacgctaaaatatgccagatcaaagatctgaagctgctatgactattacctggtcgtcataaatatactcaaatcttggtatatctaaatttgaacaccatgtgatgcatgcaagagaatcttcagtacttcagtacaatgagcatttactgctggactggtgataaccatcttttagcaacccttctgagtgaaaagaaaggtctgatgttctgcattagtcgaggctatgcttgcattccccatctttcagatggactggtttcgtcgtccaactgtgcaaaaaacaaaggccaatcgttccaatcaaacggataattctcaagccaggccaagtttcctatattattttgaggctcttgtccttccatggttgcgccttgaatcattgtgctgtcatagtcgacttcgtcttgcgaaccttctccggtggcatagtctgctccagagccgcgcatatcgatatgttcttggatcaatttgaggacggaactgcaccgcgaagccaatgtatcatacttttcataatctttgaggatcttacaagcctgttgcaaaaggcccttcaaacgaacgaaagaaaaatgttccactatctgtggggacatttgagctgcaagcagaatagttgtcgccatgtatatatcttataattgttagtggctgacaccgttatgcctcatttacgagagtaactcacatgagacggtgtaccagttcgagggtaatatatacgcttgcgtctgctctggtaaatttctgatgatgaaatctatcatatcctcagcagctttgacacactgaatttggcaccgaaagaccacatatccaatggtttgatcatccgagtacaaattggcaccagaagcattgtctgcctttcgatggcgcatctgtgaaaggaacggcctaaaaaggaggagccgaacagaaagatatctttcaacaaaaattagtccggaattcacattctcgtgtatcaggatacaaaccgggcgcgtaaaatgttcgcttgacgtttcatatgctttgtcggcgtcgggtcttcaaggtccaatggcattcgaaaataagagtgaaggttttcggtccaattgcatagctccgactcgattctaaacaggcttgtgaatttatcgaaggataatggtgagctcaagttcacaccggtgagatttctgcttagatcagggtcggctttggaatcactggagttatagaaggtttctaagacgtcgcctatgatgtgatgtagtcgacagaatgatatgtaaaagttcatattcgaaggcagagttgaattcccagtgtccattgattgtagcaccaaagtatccaatccttgttttgcaacagcttggggaactttgagcgcgcagccaaaagtcatggaagcaatcctatataaaattagcccgcgcattgaaaatatcgactcttcatatcatacctgtccatgataatgcatccattccaaacctgacgggcaaggtcccgttcatgtgggtttttgattgattcaactgtggcaggtaaatgcaagcctagatcttgtgcgatatgaatcgccgtgccaatgcttcggaatgatttctggggctttttgtcgtgttggaaatacaccgctgtaagcaaaaggatttgaatgatttcaaaattgtaaagttccatcagttcataggacattaatccttgggctctctgaaaaaaagcaaccgatgattgatatcgagagagaggtgtttcggcctgggaaactacacaagacatggcaaacatgatattgagaatgcagtgcaaagccctctcgttcatagagatttctccctctttgacccacagagtctcatatgcgttctggatagacgatttgtcaagccaggggtagatattatccacataatcccaatatagactcattaagttgtcagccaccttccttgtaggaagagcaaactgcgtgtcagagggttctctgctagcttcctttttttgcaactttggcaacttttcgagcggtttgggcgaaagtcgacttctttctttccggttattctcagtccctctttttgggcgtgtcgcatttccaacttcatgcaagatatgcgccccgctagatgcgccaaaaagactgccgttagatacgattccgctgtacaagctagcctcatcgttgtcttcattttgagagcagctgtttcgacattcgctcctgtatcttgcctgctcggcgttacaggaggcactgtcgatcgtagccttctctcgggcagtatctgaactgtgtgttgctcaatgcgtaagctgatctgtaggtaatggaccgcgacaagtgagccacaagcaaacatcatgagatgcttggctgctatatattttgaagatgattctattccaagtacttacggcatacttgatgaaggagagactcgatcagcctcccggtatatacatgcttgcgaactttgtttcctttttgagcaaggcccgcatactaccacaacacatatgagcacagtatcgatcgcactcttcgacttcgtcgtttcattctcttacctggtctagcaccatcgcattttgttttcttggctttacaaacgttacatgcgatgctgatcttgcaacgtttcggttttggttctttcgactgttcctgtgaggaagagtcctccatatgaaacgagaacatcattctgcgaccaacgtattcgaaggcagaaccttggaagtgttgaattggcaagtctcgccgttgtttctcggaccgggatttcggcatgtcctattatgtcatcatttgtcccgagttgcgagacacaggcctgtgctgtccaggtctgacctcaaatatgttctcatgaccttgagtgccttcgtaaagcgccgatcgggaaagtcgcgaccgcggcctaaaatccggtatatacagctccaacgtacgattgataatggactccatcagcaagacgtcaggtttcaaccgtctgaatataagcccctctcaaagcttatttggaactgcaatacgagctattttcggcaaagtggcttgaaaatgactgtatatgtaggcttaattgcagatcgtcggcaaatcccgcagaagtgtctcaaatataagctgacacttgcaatataaaaccagatgggttgtcttttcttttgcaattccattcacaattgtcttttactgttgatccggcattctatacatcatggctctctccgcatgtaatgccgtgtcaaacccttcttttgaaaccggcatcctggctccatggcatccatcggccgtgaatgtggcccaagtaagcaatggcacaatcgcatacagtggtgattattacctgtacgaatctccctccctgtccagccaaactacaatatcagatactaacgaagtgatgtgtaccagtaaccttcaaaccgcagtaggaaaccgcggcaacaccatctcccagggcttaagacacctcaagcctcacacggaatacaaattcagtgctcaggctcaggttccatcgccttccggctcagagtactgctcggtctatgtttacgttggccgcaatgcaacagtcggtagcatcgcctcggtacagctgttcaattttggggagtggacggaggtcacagggagctatgtgccaaagagggagaatgagatcttgagtattggcgctgcttgtgattcggaggattcttcttatacggataatgttttgtttgatgacattagcttcattcccaatgattgtgcgtatggtttggcttagaaatttacagaggaagcttttgttgcgcatatatataccgtaccaagaatttctagtttcaaataaaaactcccgctttatatatcctcaatcaagaactttcacggccatcccatcattttgatcactgacgaaaactgtgaagaggatgggaatcgaagataaagaatgtatgctgagaagtatctcactatcgacacagatcctccagcaattccaacatgcgttgctgcaacttcacaagctcggacttggaaattggcgatgaactggttccagttgactcgatctggcttcctggatgtgagccctctgtgttggttgggccatcttgaaccagctccttccgaagcgtaaagaatggaatacccagaccgcgcaattcggccatgatcgcatctgccatttgcacggccgccctatgaacctttgcatcgtaggttgcaatctctgcggcaaactccttttcagtctaatgacaatcagtcagagcgaataattaacataggcaccgagaacataccgagccatcgtcctctttcacaggggcaccgatcgacctccttgtttagcgttagtgatccgtcgctagtaaaataccgcagagcagcatagtgatagactcacaggactgcatctagctctctttgtttctcggggcgacctttctgctgcttcaataatgcctcgcgggcgtggaaccattgttgttcatgatggtgttgacttcggatcacaccgcgaatgcgcgcttgggtctcttcgttttgacctacggtgcgcatcacatgttttagtgctgcgggccaagttgtgatagtcgaagagtcagagtcagatccagaagtagaagtggtggacggtctcgttgtccttggctgcagcggtcgtggatcctccgagggcttggattgagaggatttgatttttggcggttgactaggtgttggtataggctgattagagcaaccctgaccctgagaagctagactagacaaggtgctgaggactgagttcaggtccgaggcattgtaagagccgtctcccatattgaaatagagcctttcgataagatatcgtgggatgtataggttactccgaagtttccaattaatatatcgacactgggtctgaattgatatataaagattgagaatggcgagtgaagatcgatgtagatgtcaaagtgttccaaagacggtcgacgtaggatacatatgcagagcaaggatggagaaggggcgttgagaaagaccagtcaattttggcataaagaataagtggtataatttattgatcacatacaaattacaaattccccaagatgagaggacggaaaggaatgaaagaagataaaagtgatcagttgaagctgttttgaatgtcttggcgcattcccgtgctgaaaatttaccttcaacctgcaaatccccggtttatcaactgcctccagatccatcaccccaccacggccctccaatcgcctccgtccaatttccagtaatatcaatctgattttcaatccctatcttcaactctccccccgaaaccgggaactcccaacatgtcccgatccgccgcagacgcaacgcggttcacggccaccgggccctacgcccactccaagaccggcggcgcgaaccaggcctcagactttgggaagaagaagtccagcgtgaagtcatcaccaaagcaacttggcccgaatggccaaccggagacacccaaggagaaggtggaacgactgcgagcacaggcacgggctgctcggaagacacaggcagctggaagcagtgcggaccgatggattgagtctgggcggaagtttgccaataaagcacacaagggaatggtttactcattgattgccgcgtccggtacgtttcctgccctgtgggatatgagcaaaatactagcaacacaacatacgatcctccgaagtccgagtcagcaatgacaagcaacggacccccagttgatccctactggacttatactaatccttctatgttataataggtgtctgcggtgttcttacagtctactcaatgatttcgcttacgctctataaccgccgccaacgcacgctttggatcgaaaaggaactcaagacccttaaggatgccgagatcgcctacgccaacggtaccgcaaccaccgagcagcaagagctcctgaagaaggagaagatcggtgaaattatgaagcagaagcgcgaggaggagaaggcacagaagccctgggccaaggcgaagcgattcctcttcgagaagctaaacatggaagacagcggtgccaatcctgcaccaacatccgcgtcagccttggctatcgagggtgccgacaagggccaaggtagtgttatggaggccgtgcaggccaagcaagctctcgatagtgctgcggcgaagactggcgctcctttgcccggtcagttggatgtgctggctgagaatgtgggacaggctgcgaagagcaagacatcaagctggactagctggttgacggggcgatagattggggcaacctttggtcctccaagcaaacaaaaagaaagaaggacggactggatgggctggcatgatgccataacctgtcctcggatgcaatgctgatctgatttcatcatctaccagcagacataatctggacccatctctctccctccgccgatcttcactcctcgccatatgcgataccttttctcttgcatggcaagtcgcggttttttttttttaaatcgtggcctgcttccattcttccagggggtttacggcgttttcttccattgtgtttctggaatgtgttcctagtcagtatggtctttcctgacactccgaagggagtgaacggccgggcttccatgtatatcgtgtacagtacatagatctgcttatatctgctctcatttctactctatcctcaggtcccacctaaatagtacctacatatacccccacgaggatacaagcgcccccacgacccgctggtgactcattcctgggcaatgatttcgacctaaataggcccatctaacctaagtttgcgcactaatccccaaatagggacggacccatcctcaacaccggagaagcgcttagccgcgggctaacaagtggagcagaaaaaataaaagatccttggagtacggagtagtacaccccggagaaaaatataaaaagcagattcagcccttgatcacattcctaaactttttggccactcatactatgaaatcgtcaacagtcccagcgaaccgcaaaccccccaaaatgttcttttttgacaccagctacacattcacacatgaattccaagggggtttcccaaggaacaagcaggaaaaaaaaaggtacaaaggaaaccgctgaaaacccgagataaagaaacaacaggtaccgaaacgaggtatctatgccagacccgttctccctcctctccgcggaagaagggctgtgaaaatcagagacaaaaagggcatgatctacagagaaccgaatccctctattgctgcgcttttttggcagcacgacgagcacgaacaccatcggcgagatcctcgagcacctcgaccgtcatctcccagttgatgcaagcatcggtgatgctgacaccgcggaggagaccctcgggtccctcggggggaaccttctggttaccctcgtagatgttggactcgatcatgacaccaatgatggcagtctcgccctcacggagctgttcagagacagccttggcgacgacgggctggttgaggtggttcttgttggagttaccgtgcgagcagtcgaccatgaggacctcgcgcttcttcttggagcggagagcctcacgggcagtgcggatgctgtcgcggtcatagttggtgcccctgtttccaccgcgcaggatgacgaagccgtgctcattgccggaggtcttggtgatagcagccagaccctgcttggtgacaccgaggaagcggtgggggtgcgaggcggcgccgatggcatccacggcaacggtcaggttgccatcggtgccgttcttgtagccgatggggaaggacaggcccgaggcgagctcgcggtgcagctgagactcggtggtgcgggcgccgattgcgccgagcgaaatcaaatccgctaggtactgtggggagatggtatctagcatctctgaggcaatgggcaggcccgtgctcgtcagatcggtgtacagcttacgggacacgcgcagacccttgttgatgttgaaggtctcgtcgatgtcggggtcgttgatcaagcccttccagccgaccgttgtgcggggcttttccaggtaggcgcgcatgatcacgcagagatccttctccagttttacggaaagctccttcagccggcgggcgtactcaagtgcggtgtctgggtcgtggatggagcatggtccgaccacgactagcaggcggtcatcgcgctgctcgatgatctcaattgcttgattccggccggcgcggactgtttcgatggcacgagcgggctatacagacaattgttgtcagttggtgtgcttgtagttttgccatgtcaccgcaaatagcggggtgaaaaaaaatttgtgacttaccgcagggatctcagtctgcaagaagtagggtgacagcaatgggtcgtatccgaggactattaacacaaagatcatcagtatctctcacacgcaaattggctctggacacaattcaacataccacgactgtcctcgttgacttcagtggtcttgatgaggggcatggtgatgctcaaggaacactggtggtgattagtatagattatatagaagattataaacagaagatccccagggccaaaatgcaatttaaagcagaagaaatgactcacaaattcgaggtgtcgaggaggaaagtagtgggactaaaaaaataagaggcaaaagtgggccgagagatttcacgggtcaagggatggttttgagtacttctgtgtactgtgctatttatgggatggttttattagtatttggtcttctcatactcttctcactattggcttccaacatatgtataatgtatccaagctgtactctgtacgggggatgagatctagttgtcttggctggctggagaatatgagacgtccaatcacgggaccggagatgaccacaagttatacatcgcactccggctgacctgcatatcatgtcatgtacttctgatatctgcagcagtcaggagatttccatgcactagtacatggcgagaaaatcaagaattaaacagccagctggcaaactccagtttcatattccgctggactcaactagcagaaaatatggtatatcaaaacattgccttgaagaccacagcctaatcttttccaactttgaatattgaacctccaagccaggatcacgcacacgggctttagctactacagcagtctgtatacaaagtacatttaaatggccgtcgccggttcctcgtaatcttaaattcgcccgactagaaatggctttgacttaacgtctgtaaatgacatgaacgatgaagacctgtcttacaactttgcttcttgaactactcaatttattctcatactgcactatgcacctcaatctctttatttctagacccctctatagacctgctttgagcgttagtagttctatcaatttgcaattattgcctaggcgacctctcctttgatacctcaaccgccaggaacacaacactcaactgtcgcacccacgtcactcttaatccacctataatactctacttcgacatctaaactcatctattttttttttcttaggcttgccttcaaatacttgttctaacgcagattggtttactggcagtattgttctccaatctcgaagtgggacaatctgcagctctttgttctattgcaatgggatatagaattcatgaagacagaccttgattcttgttttgatgttttgaagacttttaattcataatcgtcacaagtggttacctagtcaggtcatatcctctaattttgctgttatgcaccccatgaagtgttgacaaaaaggaggtaactacactctctttcatgtttgcttctcgcacgctgctgggtttgactgtgattgtccttctctctctttctatctgtttacctttgttttcaacttcccctcttgatttttatccttccttttcttctccccccgtcatcttccatcaccttcaattctctgactgtctacacttttcatctctcttcaagcatcttcagccgcgatgcctggcaacgctggaagcaccgttcctttgcgcatcagaatgaagaaaaataagcccaagaaagttgaatctgagatgaccgaattggcccgcgtgcctcgcgcgccacagataccccagaatgagaaatcctaccatgttcaggtaaacactggtcctgacctcggaatcacactggcatagcctgcctcgtctattcgcgcggcacaaatcccatcttctagatactgataattatggccagggaatggtgggctgcgggcacagctcgactgcgcatggtccagccaccaagggaaacggcgaccacatagctgtctctcccgagaagaaggacggaaaggtactcgctactgaccgtcgcttccatgccgaaaacgagtatcccacccgcttcagcttgcaagacatggaaagcgacatcggcaggtggatctgtcttgcttgtcccctttcaacccgcaaatgcaaggactgcaaacagtacgaaggtcacgaagactccctgatcatcgccattcatggagattgtgttaccgacaagaccggaaaacgttcagcaatgggattgttctacggccgcggcaacaccggcaatctctccttgccccttccaggcaaggacgaccacagccacacgacccagatcgccgagttgaccgcctgcctgcgagcattgcgcaatgcgactagcatcatcgaggagcgccacagcatgatgcgcaaaggcaagctcctcatgccgctgaatgccttcgttatcaaaacggactccgagtatctcgtccgcagcttgacggagtggttgcccaagtggaagaacaatggatggaagacttgcaagggcgctccagttgctaatgctgacctgttcaagttgatcgaaactggtatcaacatggttgagttggtcgtccaggttaagttctggctcgtgcccagggcgaacaacttggaggctatttgtctggcaaaggtggctttcatcaaatgatgagccaggggatccatcgatatgtccctcagtagggatatcaattagttatctcaggatctctagtttaatccaaacttctatgatatcaaattcgggaatgtctcgattctcggcttggcttccggttccaaagtgccgaaccgaaatagctgacataagcatccgatgggctcccgatgtcctgtccagttcgaggtgcatgtctatcattaggattattcggtattgtagaatctccggggagaatgtgtagaggctgttagaaatcgacgtacaagactaggaacatcgacttgaatcaacttttctccccacatttcgcgggaaaccgcttagccgatcttcagtgccgcgaccactcagcaacggtagtcgaccaaactacttccgaccccggaattttgtccggcatttgcctataagtaatattggtgtccccgggggagtttggatggagttgttgccggtttctcgcttttctctttcttgcatactttagccattgtacatatgtgagtaacagtccgagctgacattcaattcgaaactgacggcgccgagaaagatcagaaataccttgaccatcggtatacaactttcaactaattccaatccaatcaacctacaaaaccatggcttctccaattccccgcggacttcgccaagtactccagaagtctcccaatgacatcgtcattctctcctcgctgcgcacacccgtcacccgcgccaagaagggtggtttcaaggatgcctacccagaagagctactagccagcgtgctgcaggcaacactgaaggcaaacccgaacctagatcccgcccaggtcgacgatgtgctcatcggctccgtcctgcaagaattaggcggcgccaaagccggccgcatgggtcagatccacgccggcttccctcactccgtgcccttccacacgatcaaccgccagtgctcatccggcctagcagcgatcacaaccattgctaataacattcgcgccggcgccatcaacatcggcgtcggcggcggcatggaatccatgacccgcaactacggctcccgcgccatccccacagtcctctggcccgagctgaaggagtcccactcccaagactcccgcgactgcatcatgcccatgggccttacctctgagaacgtcgcgtcccgctacggcatctcccgcgcagaccaggacgccttcgccgtggagtcccacgcaaaggcctccgccgcgcagaaggcaggccgcttcgactccgagatcgtccccgtcactactaaaaccctggacccggagaaccccgatgcccccgccaaggatgtgaccgtctccaaggatgacggtatccgccacggcctgtccatcgagaaggtgggctcgctcaagcccgctttctcgcctaccggcgccagcaccgccggtaacagttcgcaggtcagcgacggcgctgctgctgctttgttgatgcgacgctctaccgccgaggagctgggtttgtctggtgccattaaggcgcgctgggtcgcgtctgcggtcgcgggctgtgcccccgatgaaatgggcgttggccctgctgttgccatccctaaactactgcaggctgttggtattgaggttcccgaggttggtgtttgggagattaatgaggctttcgcctcgcaggctctctacagcattcgcaagcttggtatcgaccaggctaaggttaaccctaatggtggtgctattgctatcggtcaccccctcggtgctactggtgctcgccaattggctactttgcttcctgagttggagcgcagtggccaggaaatcggtgttattagtatgtgcattggtacaggtatgggtatggcgggcatgtttgtccgggagtaaattgttttacttgctttgcacaaaatgttcttttatatctttcccttcgtagcatgataccagcggtgtatgtgtatttacagtttgcatactatgaatgaatacattgaagaatatttctcattcaacatcaaacgtggcctttttttaaagaaataaaaagagacagactaaatcactacatgcaatttgatgcgtaaaatgattgatttgaattattaaacctcgccttgaggtagtgaggaaaaaatgccaagcatcaatataaccaacacgtgactcgtgcctttcttgaatttgtttctccgtccgggccaactccgccagctcgacgctcataaagaacattcgcgcccacctcgacaatgcggccctcaatgcgcctccctctgcgggaggcaaactttgtctgttccagctgcagaattcagactaccccccgtatctcgccgctcggtcaagtccgccaatatgcctccgactcccccggactcctcgaacgcgctcggcgcaagatttggggcaccgacaagcccccaggcccagcagacccctacactggaagtcagatcatgccaggaactgatctggcttctggagagccggtagcagaggacgcattcagtctcgaacagggtgaagcactgtctgaagaaatcgatgacaacctgacctgggagggaatgcccaggattggttatctaccagagaaagaatggcgtcttcagggttcaaaggggccagctgataaagtcaaaccgtatgtttgatccaagtcatcaattcgatgcttctacatcctggtttgattttctcaatggatttgctgacaatgtccttcttgattgatcgaacagatggtactacaatccacgacctttaccatacatgaaggctgcgcatcaagctgccgtggagattggtctgatgcaaatgttgttggggcagaacgtcaccgttgttagcaacctcaacctcaagaccgaagcacagctcgagtcggttaagatcgaaggccagtctggtaactggggcgaccgtctccgcttccccgatgtcaaaacaatgaatatccttctacgccatgcagcagggagtttgaaaggcaaagacgccaagatcgctcaccggaaattgcaaaagatagctggcgagaagggaaatcgcctgtatgacgcagagtccgagggtcaaatgcagaacagcatcagttccctgtcactggctgatggaaacatcaagtttgttgtacgtattttcccttcgacattctcataaccaacattactgataaccacatctcagttcttcgcccgtctctccaaattgatgtctcagcatattcctgaccacatcatcacctcttccgccaccacgagtgatgtcttccgcgcacaggaggcacttcacaaaaagactactagattgacaccggtgcttctccatcaacttatggacaagaacggtgccgctcaattgcctaacgtcaagattctcgatgttcgccagacccgtcatgaccacgatgaagatcttggccgcaagaagcttattgtctctacgctctacaagaatggtttgatcacaaagagcctgggccagaaacaaccggcccattggaagcaagctaagaagactgaggcgaatgcgtaagcctctccttgtgttttgtagaatgttggaggcatacttttccctttatctgagagcaatcttttgtacattagaattgttgattgaattgcatttttgtcctttgtgagttcagataattggtatgtacggtatatctacctgtcgactcgtccaacataaaacgcaatagtcatcatcaatcatcgaagaacaccaaaagcccttgaacaccggaaataacactccttccatgacttatctcacattgaaaagcaaaggcacttcattcaggcctcacgtctacctgcgcagcaggaagaacacaatcaggtcatgatatagaaaatcctcttgtcatgaaatcacgattcttggacccgccgtccttcttcgtgaagagactgtcgagattctcattcccacccatcatcttccggcgcttcttcttctcattctcctccgccaacacacgggcagtgagcgaagaagtagcggcgttcttgattccattgctagaagcagtattaggcactggtgtggaagtgttgcttcgacttttaggatccgaggattgcttaggtactaccaatccagcaggctctatggtaccgggagcatcagctactccctccgcggaggcgttcttcttgcgcttctttgagccgggggctttcttgagggaatgcgttaggccttgttcagcgagtttatggcctcgcgcaatcagacgttccttatcttcttttttggtggtaaggatgttaatgatattgtcttcgatgtagggttcgttgcactagcacacacacgtcagccactatttccgctttgtatcaaagacatgattcttacctgtaagcacttgtcgcctttgagctgtcggatagcctcctctgcaaatacatgtccacacggcaccaggtacacagacttcacactcgggcccaacggcttggcggtgaccgggcagatccagccctcgcgacgctcacggggcgcataagcacggcctgaggggtgctcggggagctcagtgtcgatttcgaacttcatctcaaccacatcccggagcgacttcactcgcccgcatagaatctcctcgcagtctgccttagagctgatcccctcgacatcgtcgccgggaagcaggaactggagaatggcgtccttgttataaagatttccgactgagtctgatacaattggccgagagagggacttgtgtgagagcgggcaagtagtccaggagtgctcttgctgctcgcgctgagtctcttttacttgcgccgtgctcggggcacgggctgcctcgcgaacgagctcgcggcgagtcggaatactaaaaagctttgtgttagaatttttgagtctatggcacatttataatagagtcgcttacctgccaccatcattacccatatttgcgatgcggttgtaaaatgcccccgacttcgccacgataaagttggaaagatagcgcgctgactcagcagcgattagatccagggcccgctatcaacagctggccagaagctctctccgcaactcgacaaacaaagctcaatgcctcaagcatgagacttcctcagtcgttattcttgctggctgccgctgggtcggcggtccaggctagtagtgacaagcctgcccgtccccgtggcttgggcccagaatgtgagtatctgaaccctgactttctagatccattatttgcattattgtttgcggctggttcatgtagcagtgatctatgataggcaattgatcctcttatattagagattacactaatatagtatccttagttgccaaattctaccaggactcaacgacattcacctgtatctcgaatccctcggtcaaaatccccttctcggccgtcaacgatgactactgtgactgccccgacggaagcgacgagcctggcacgtctgcctgcgcacatatttcgcgcaattcgccactaacggtggccgaccggcctgggaatagcgaattagacaccgtactcgctcttccgggattctactgcaaaaacaagggccaccggccatcataccttccattccagcgtatcaacgatggtatctgtgattatgaggagtgttgtgatggtagcgatgagtgggctcgcgttggaggcaccaaatgtgaagaccgatgcaaggagattggcaagcaatggcggaagcaggaggaacagaaccaaaagtcgatgaatgctgccctgaggaagaagaaggaccttcttgttgatgctggtcgccagcagcaggagctcgaggaccatattgctgcgctcgaggccgaggttcagggtgctgagctcaaggaacagaacctcgaggctgatctgaagctcgcccaggagcaggaccgcaaggtggttcgtactggaaatggcaaaggtaatggcaaggtcaatgcccttgcaaacttggccaagggccgtgttgacgagctacgcaatgcgttggtcgatgtgcgtcggcagcgggatgaagtccgcgagcgggtgaaggagcttgaggatattctggctaaggtcaaggtggaatataaccccaatttcaatgacgagggtgtcaaacgtgcggtccgtagctatgaggactacgctgctcgtgagcaaggcaccgagggtgtgaacgctgccgtcgaccgtgacttagacgagattgccaaagccgacggtgaagaacatggtattaactgggaacactgggaaaacgaggaggatggatgcaacgactcggatttaggtaagatattccgtgattccttgtgacaccttgtatagcttaccaacaggaactatagtgtacaagctcgctgcttatctcccaccctcgcttgtcagcttcattgaggatagggccgtttctgttaggagctaccttgaagaaaagggcattcttcccaaggccgataaagactcttcctcggaatccaaggccgtgacccaagcacgcgatgcccttaaggccgcgcaagatactgttacaagcatcaagaacaagctccgcgaccaccgtgccgaccttgagcaggactatggccctaactccatcttccgcgcgctcaagggggtatgtatcacccaggatgcgggtgagtacacgtacgagcattgcttccttgagtcgaccaagcagaaccagagaaagggaagcaattctgtgtcgatgggcaaattctcgaatgttggaactacgaccgtagaagaggtcaacgcggctggcgaggtcgtcaatgtcgagaagatgacgattcaatacaataacggccagtcttgttggaatggacctaaccggtcgaccaaggtcattttagagtgcggtgaggagaacaagatcttgaagacggcggaagaggagaagtgcgtgtatgccatgcttgttacctcgccggctgcatgtgcaagtggtgaggaagcaggtaatgttgcgcctcgctcgaaagacgagctgtgacggctatagatctagagatctggtgttacatatgtattgaatgtttatttcacgtgcatctcattcattagaatgaattgcaattcgagcgctttttacccttgtattcttgttccttggtgttaaagtgaacatctgtttctcggtgatcggggttcgattcaatcgacgtatgtcaaagacatctgcatagccctaaactatgagcatagtcgaaacacatgtattggagcatacagatactactaaaggtcatgaatcacacaatataacatcttcatagttgactaaaaattaaatcacaagaacacacacaaggtcaaatccgaacctataaacttaacacctcatccacaaggccccaggccctattatccccagatcctagcatacaatcatctcggtcatgaacgatcacaatggagttatctcataactcgacgaaacaatgagctagtttgacagcagtggaagcccgggtctagtgtgggttgtatgggaggaagatggcggtgatgaaggccggtgggttggcttagtgctaggagggtagttagtatatcttttgccctagggccgcatcccactatgagtgaccgttataagacagggagtgagcacgcaggtacataccttgcagctagagcaggagcaagaagtgcactcgccggagcagcagttgcaggtgcaaggagacatgatgaagatagagttggtaggtaaagaaccttgaaaaagaagcttaagagtaatgtttggtttggatgtagacggcttggatagagaaagaaaagtctaacaggggacggatatgagcccagctttatagattcacgactgctacggagtaaattatcccgatcaataatagcgcgcataattctatttcctcgtccatcatgctccctccaatctaagacgctgtaatgtcgccgcgacccgttcacactccatagtatcgcgtggtcgagtcaaatgagcccagccctgcatcccactcaacccgcctgcctatcatgttcttcaagctattctcacgcgctatgcgctgtaaaaagaatactctggccagatgctcaaccgctcgccaagcctatcaggttctacctatgatgtaaacttttacagtccgcccgccctcgggcgaatatggcgcaaaagccggtgagtagattagtatccgatctattttcttgcgaagtctaagtgttatctttctcggtgttttctcgatagtataatgggtacaacatgaccgggttaatcaggctatgtacggagtagctcagattgcgttgtgctcgggccgggttcctgcgaagaatatagctgatccattggcttaggctgaagactaagaatcttgcaggggttcgttttgtggagcaatggtctgcattgtttacgttgcttacacttccagatacggacatcgttgcctatacatgtgtaagttgtttcctttgaacgtcgactactagacttggatatgtttcattgatcatatgttatgctatgtggagggatatgtttctaagacaatatagtgaggtgaataatatatgggataatgtggcagcacaaaacactccctattagtgcgatattaaaatccaacccttctactatcatgccacaatgacggccacgtttcgggcacgacgtagatctgcatgcctcggtccactggtttcgggacgggcctgttattatctcatgagtacagtcataactatgtacaacatgcgtaccatgatgtggagtgtaagtactagaacgaattaggataaacgtcgtattcaaaggaaaaacggagaatacacagcaagtaaaggccgagtgtgtaatttcccgcgcctacagcggtttcaggctgggctattgtcgtggcagcctatgaggcgaagtttgctcggattggggaccttggaggaggggtgctacctggcctcattggcagccctggattacctgagatatgtccatatccacacagtggagcatgccagggtgttctggctgtgtttttagttgtttttattgattgctttcggggtatttgtgtactagaggtgtatgagcggcaagacgccctaggagctgcacctgcattgttggggttggattagctgttagctcccgagatcaggttgaggccggcattagatcatatccatatatattgtacatagttgtactatgcaaagaaaagaaaccgtgcataccaagagacaaggtcgttgaggcatctcactctgtacaatgtagtccgtacgtgacttcaaaacgccgacattgcgcgtttgggcctcctgcggggacagactcattgggatctgactgagaaccaggagcaaaccagccagacaccgatagagtggagaggctgcatattggaagatatcacagaccccttcgaggtgcatcatgcatgattatgataggctccgattcgatactgctcttctgggactcgtgcagcatcgagtcccgcttttaatctcttcttgcaatcagctctgcggggtaccaggtgttggggtctttgttgtagaaaggtttgatgttggagatgggtgaaaatgccgcatcggcaagaaatagccgcagaagccggtcttgaaaggctgtgaagaatatttccgtttcggggcactgagacgatgggatgatcaagacgataggatgatcaaggcaataggatgatcaaggcaataggatgatcaaggcaataggatgatcaaggcaataggatgatccctcggtggactatgcggttaggttggaaataatgcctgatattatgtcagggttcgtatcaaacaagattcttgtggctcgtacagctccttcctccgtaagggtatgtgtcctcctcccagactatatttctttatcgaaatggatgatttgatctgagttatgtactgagatattcctcagaggctatgtatgtcgtcaaaatacggtagctgtccttagttttctccacttaggaggctgttcgggtatctaggtatgtcggacaggccgtttagctcccaaggttgatctaaatgacccaagtttaggatctgatgcccacaaggtccttgatttacaaagaataaaagtggtcgagcagccgcatgtcattcactatggagttatgccatgacacgtatccctgaggaacaccaccgggagctacccaactcaaatatcctccgtctcacttcgacttccgtgctcatattccttgaaagattcgaaccatcatgcccatatgggtgatttatttcttctgaacgggggtcgggtcagctagacgtcatggaaggaagaatgagggcatatcacgtacggggcagttgcaggcgccggcagggcactggcaagaggagccgcagctgcatccgtgatcgcctatcatggtggtcagcattgaaggaaaaaaaatatggtgaagtacgatgagtgacaaccccgctatgaccccaccatttcggagatcaggcgcaaagcgcggttcttcacagatttctgaagtgacatataacatggaagatgaaagtgcttactcattttgtatgtttggggtggtaaaaactggtgaagcttttgaagttgtgttggttgtaaaggcgaggtgggggagagaagggaagaaggatggggccgggatcttatatactcgtgactttccgggatacgtcgagtctgagggtcaggcacctgagtgaattctcattcgcatctcgatccacgttacacttgagggcatatttctgtccccgcttacgcacatagccaacgcattgctttcgagagagtttgcgatcagattattccctcaaaccatgactactactcctatcgcttgcatctgcggaagcgtatctttatctatccagctagactctctcaccgaccattctaaactccaattatgccattgcaaccgctgtcggctggtgactgggcagttatcttcatcgtattatctcctccagcatgaaccacccaatctagatggcctccaggaataccaacagtccgaccacgtgagccactttttctgtaagacatgcggtgcccacgtcttcgctcgtatgcaccctgggggtcagtttctagttgcctccggcttgttagcaaagaatgttcccttggtccgagcggttgagcactggcaaagcagcgatactggtgacggtggactcagcgcactgcttcctagaacggagtctcctgtcacaggttgcagattacatatttcaaccaatatcgaaagccctaaccgagaatccacaaacccagcagaatatatatcaaccagccagcatttgcgggcacgttgcctctgtggaggggttgagttttatatcactaagcccgatgcatcgtccttacaagcctcctcgccatggccagatctcctggttccatactataccgggtctggggcaaatcctggcgatatcaaatggtggttgcgaagtggtggtacaaaatatattgcaggagcctgtgtttgcactagttgtcgactgagcagtggatttcccatccagacctgggcatttgttcccaaatccaacatctttaatgcagacggttcaccacttatgttcaatgtcgggaccatgcagcggcatagaagttcatctggggtatacagggaattctgcagccgctgtggggctactgccttttggcattgtgatgaacgaccactgctaattgatgtgagtgtgggcttgctccaggcacatggtgctagagctgaggactggttagaatgggtaacaaatcgtatcagctttgctgagatggcggtgcaacatgatttgattcatattctagaggatggcctcgagatacattcaaagcagaagtagagtcaatatccggacaaaaacctatgaatgccatcttagcaaccgtcttcacctaggtagtcataaagaagggaggttataggtatgcttcaagaaggcggtgatacatgcggtcgggcaattatgtctgttggcctgtttccttgtctgtacacgtggaaggtgcgaccaactccgtcaccgccttccctctgcctgactttttcggatatcttttttcgcgcgtcgaaactcgaaacacctgattctctttcctccacgcgtctgcatttttgctgcttaactgcagctgttcaaaatgccaatgccttcagttgctccgttccagttcaaaggaaattctaattatcgtggctcgcgtcctaatccacgacatgagttcactttccggtaccagaaacccgccacgtcggaccgaccattgttgtcttcgaagagggaaagcacaccggaacggcttgagggcgaaactaagcctgaactcaaatttgccgagctttctactttaagcgacagcgaagaggcagaaatggacatgtctgatgacgatgccgagcgaccacgcaagagacgtgcgctaggtgtcgatgggtccccagaaaccgctccggcacctgctgcccccaaatggtcgaaccccgatccttacactgtgctacctcctccggccgaaactacaaacaagagggtggatgttgtcaagctgattcgcaaggcgagacttgaagttgtcgcaaagacggacgagacggatgcagtcaagcagaactcagacttcatttctctcggcatggatttcgaaccagaagtttctcagagcaacgctcctgaaaacgcccccagagggccaaaggctcaggaaggtctagatcccgccattacgagtcggaagcgaacccgtgacgatgagctcaaaggattctcccgaaagaccggaaagcctgccagcaggttcaactacgatggttccgttattgatcaatggaaaccactttcccaagagacaggcacgccttggttcgagggcaccccagcatccttgcacgtgggaacccagtcagtactatcctttgcgctctttctcttttctctctaacatctaagctaggctgcataatgagattctcagcttctatcactgggccaagccacaggaattcgaacacatcgtccgtgcagatcttgtcaatcgattggagactgcattccaacaacgataccacaacgtttcaatccgggcctttggctcttttgcctcgggtctctatctccccacggctgatatcgatctggtgctgctctctcatacgttcttacgcacgggggttcgcacattcggggagaggaagggtcaaatttacgcgttttcggctttcctcaagagcacaaatctggccgttcctaactcgatcgaatgcattgcgtccgcccgggtaccgattctcaagtacgtggacaagctgaccggattacgagtggatttgtctttcgacaatgacagtggcttgattgccaacgagacattccagaaatggaaaacccaatatcccatgatgccagttctcctggccgtgattaagcagttcttgttgatccgcggcctcaatgaagtcccgaccggtggaataggaggtttcgctatcacttgcttggtgacgaatattctccagcatctgccccagggccatatgcagcctaacctaggaaccatcttgcttgatttcttgaatttctacgggaagcaattctcttataccacgatagcagtccggatggaccctccaggctatttcaccaaggtaagtggattttggttcgcattactgttgactagccagctgataatgtcaaacagcaatacttcggccaccccgatcgtctcacaatcgaagaccccaacaaccgagataacgacatctcaggtggcacgaaggaaattgggttgatcttgcgagcattttctaatgcccatactgccctaaagaatcgcatggaatatctagcacttgtccaaggatcgaacaagagcattcttgagcccatcattgcggcgaactttgatgaatatgtcgagcaacgcttccaactccgtcaggtgttcatggcagaggataggtttgctcgatacaggaagtcttcgcctccgcctccgccgccgggatcccctcctgctaatggagcatccccccctcctccccctcctatcgacggagccccctcttctttgccggcaccccaagctcgcaaacctgctaaaagactcaaggcaaagttgaagggcacaaaatcggagccagaagatatttcttcggatgacgcacccgggcccgaagcaaagtctgccaaagctcggaagggtgagacaagacgtcagttgtgtcaagagcgtgcggccagactcaaacgcctgaggcccgacctcaagaaacttcccaataccctcagcctccgccaagctcgccgccatgcaggctatgagaccgatgagcagatgaatgcggacttggatagcagagagcagaaacttctcgcctcggcataaatttgagtctccacttccacgcccgcaacgactttcttttggtttctgtttgtatgctttattttgtatgatgataccccttacttcgaatggtttggtgatttggtgatttgcacggggaagagaggagggatgtcagtggcggtatggtggggaaggtgatatgttcgtgtgtgctttggcaaacctgtatgcttattcttctcgttggcgagaagcgcagccaatgaccgcggagatcgagaatgagcattcttctttgggcctgagacgaaaaagtacttactatttaggattctctcccggacttcgacctcgccagattctgttgacttgtccctcggttgcaattgattagagctgtcctgatgttgaattcagttttcgatcttatttgattgagaactagtttgaatatggataagccttgacaatctcaaaccctggatgcccttgtttcatcatctattcgagtcgatccggcgccccaaacgtctaatgttctctcgggtttccctcgacgagtaactagttcttgcagttcttcggtccctacacgggatgctgttagtgatttcaatgaaacccccccgatgattatggattcgcgcccaacgtggatctatgtttgtcggcgtttatctttcttgcttttccctttgccctctccttctcatgccttccttctcacccagaaagcgctagatgcgacttcttggagaggaatagagcatcaggagctaccgggctcgggagcgcaggagcgcaggtcgaacttgcctttttgcaatcggaaggtgggcccatcccacgtgttgccgagtcccttcgtgcctgcaacttttcgtctttacccagaattatggaattacatattggagttacgaggaaacattgggagacgccgtaatggctgtatctcgatctattgcatttatcaggttctatctctgatcctatgcaagctgcttttccacgtctgacggtggtgtcagcataggatccgcctcaatagcggtatcggatatagagagagatggcttccgtccccttctctcctcggcctcgatcctctgcacagcagcaatatgctcctcggataacgaattcacaaagtctggcgatggactggcccagacataatcaacccactctgtgcctaagatatcttgaatttctcgtgccagctgcaagatatgaactccacgcgtacgagaccaagcacggtccgtgataaggtcctgctggggcgtgagtatattcgacgccgtgggcacatcccccgtcgggacctccaagctaggggtaaatggtccaggcgatttcaacttagcatcgaaatacgaggcgtcgtcatcctcattcaaattctcgagcccatcgacgatactgtgccacacgcgcaaagtctcctccagctcagcaatattactaacgcccataacgctgacgcctagccttctccccgtgcccaaattggccacagacaagaacccaggatcggcgtccgcagcccgagcaagcggcgcaccgagaccgccagcccgcgcaccaacacgcagccacgcctccagcgcaaaccgaatcgcaacaacctcaagcttctctccgtggcgcgaagcacaatccgcggcaatacggatagccttccgcagagcttcaggggcgggatggaaatcgcccatcgagccaataggcacgccgtcgcgacgaagcaatcccatccccagcggcgatgcgttcggaacgacatcaacgccagcagcaagtagcctgggtagggcatgcgagtgcagccgcgtattctgcagagtgaagttggcgtacgacatgacgatatcgagcggctcacccgtctcgcggagaaccgtctcggccagatcgctgagcgtgtcgaccgggtagccagagataccgacgtagcgtatcaccccctcttcatcgcggagacggcgcagctcctgcaccgcgacgacaacttccgcagccgtcacgaactccacgtcgtggcagtacactacgtccaggtagtctgtgtgtaggcgttgcaggctgcgtcgcacgctgtgtctaatccattgaggcgagtagtcgaatgaggagccggctatgcgcccgactttagtgaggaggtggtatgtctcccgtgggaagttggcttgcacggtttctgttgcgagggcgcggccgaggagttcttctgcggggccgtaatagggggatgtgtcgaaggcgcgcacaccgcgcgataatgcgcgctggacgagttctgttgttggaagcgcgtaagggtcggcattgtattgggagttaaaggttgcggtgcccattatcagcggaggcagcgccgcggacagtggggtggaggggcgcatggtgtgggttgggaggccaatttcgtcaatgccgaggggctggctatggaggcttgggtattgaagattggtcaattggtgagagtcttttcaaattgtaagtgtatcgactatattttctccagaaaaaaaaggaaccccccttcggctccgcttcggatggcgcaatggcgggggattccccccgaatcgggacatatggccacgatccgatcgatcggctttgcgttacatctactctttcgaaggtttcggttgcgtggattgaatgtccccttgatagaagtaggcagtgacaacgtgaaaatgtttctggcaaggcggcggtggcaaaaagggacaaaaaagtcaatgtagatcccgacaactacgatgcatgtatatgaatcaacaaatctagatcggacattacacacaagttaatgcaagtatatagctattgtacatgaatcctttccgagtgagagtggagaaaaggtcaacggaacgcggcgcatcacaaatgatatacatagaccgaaaggtcgatgagaaggtcggacatgaacaccttcatatccgaccggagatgacgcccgaggaaatccgggggccatcttaagacatcacagagaaagaccccaatctagaaaatcaaggcgtctttctctaacaacccaaacgccatgctatgccaaaaaaacgaaagacgagcagatcgaaaacaaagaagccggttggggccggaggcttctctcgcaggaagtatagatgtgctcgtagaaaagccgggggcccggggaaccggagaacgacgcttattgttgtgttcaattatctttgtagaccttggggttccatccttccttcaattccttgtcgtgcgcggctttgcgctcgacctcgcggaactccatttccagacgctcgcgtgcacgcagaatcttactttgcagatagaaactgccgcctttctcgggattgttcgtatcgaacagtttcttgaaccgagtcatgacatgttcgaggtcgtgttcgccggacgccgggggcttgacgttcaggattttgcaggcttcatcgatggtcacgctcgaggtggtagtagattttccggctgccttttgctgcccagcgtattttccggacgcctgggcttgtttgtaggcttcggcgaaggcgcggccgaagacccgggctccggtcacgacaacttgagagacgatgcggtgagcctagtagtttgttagatttaattttaagaatgggaagaataatgagatgaatgaacataccattgagaaagtgccgtggaggaggcgatcgcgatgttataggttgaagaaggaaagatgagaaggggaaaatttcggctgcgggttttagcgtccggagctccaggcacgggcatgagtatagggaacggtagtatagctagcgaggtcattctaattcgagattgaagattaaaaatgaagtatttattatttactatcatctacatagacatccattctaaaaaagattaaaaattagaacaaaaaatagaaatcaaaatccttcacaccgtatacgagagtcacatgtccacaagttcgatctccccgcagatcttcttagaccgaacatgatcctcactcatcctagacgatgagctcattgtcactctatgacctgtccataattggatggcagctttaggtatgctatttgatcatacctagccttaaacacggtccctgatgaaaaagaaaacagacaaccttccgtggatagactccatgtcgccctcatcgaacacccaagatcatggccagtcggactctcaaccgccgacggtcgctgccttctctccgtcgacgattaccggctcggctctgacctcgcgccagcgctccagtgtcatcgtacatcgaaaatcacctctcctagtggccacaccgccagctatcactcgagccttggcatactcgcacccgttcatacttcctctaaataaatttgttggtatcctgacatggacttctggagacccgtggcagagttttctgctggtatctaccttttggactatcgtgctatatggcgatactatcattctttgggcaggaccgatcctggtcgtggtcacgttgatcctcggcatgtatggacgtcgttactcgcctctgtcgtcaactgcatcaacaggcgaaaagcacaagaccaaggttgccccagatagctcactgcgtcatcagaagagtcttgatgaaatcgttgaaaccctccgtatcttcacaaccagatgcaatattctcctcgaacctctactcgacctcaccgacttcctatccacccaacgtactcccacatcggcgactacaaaacctgcgctgacagctctgttcatccgtatcctcttagtcacccctgtctggatcggtctgactctacctccattctacatactcaccacacgccgcgtcgtcatgaccgtcggcactattgttttgacctaccattcccgacccgccagggtgtcgcgtgtcattttgtggcggtctagagccgtgcgtcggctgtgtgccgcagctacgggcctctccgtcaccgataccccgagcagtccacaaaaggccccagctcaagccgaaggcgaaaagcaaggcttaaacatttcaacgcggcggcgtggaaacaatgccggtgtgcggttcacgtttgttgtctatgagaatcagcgccgctggctgggtatcgggtggacttactcgttgttccccgcagaacgtgatgcctggacagacgaacacatgaacgcagtgaatcccaaggattcctttgagttaccagaagttcaaacaggagatgccaaatggcgctgggtggagggaagtgaatggcgcatcgaaggagcggacaactttaatggaaaatcggactcgaaggggtcaaccggcgaaggatggatctactatgataacaaggttggtgctttctctctataccttttgtttattatcttctaacggaactctagtggaatgacggtcgccgcggtcaagacggatgggatcgctatacccgtcgacgcaagtggtaccgtgacgctgaattggcggacctatcacctcaagacacccagagttcctccgcagaaaccacttccgggctcacgcgggcactcgaaaaggagaaagaacagacgaacgacgacaacgccgacgcacaaagcatcgcgccatccacctcctccaaatctcaacgtcggcgctggttcagcggtacctatgacaaggaaatgacttcccctagcgggccgcccgctgacagtgggcgtgcaaatgcctcgcgacccatcagcatcaaaaatgcccgtaaattgtctcatgcccgcgaaggaagtgtgacaactagtgacagcgccagtttgcgcgagaaggagatagcgaattcgcaagatcatctcgaccggtggtcaactcgagctgcgggcgggacggaaagggccgaaagggaatgggggctgagcgatgaggtgaacatggggttgagttgatcgtgcgttctacactcatgtatgccatcatccttgctcgaattccgccattttctacctaaggcatggccttatatatccttatatattcttattgttctttgagcgtaaacggcggaattgtgaattgccttgtcaagttatatctttttgccccaatacgtaaacggtaatggacggaggacggagtagaggtgaggctatcgcaaggcttataggagcagtggacggtcaaaatttcacattccctcagattcaaggtgtgaaacgagggcaaggccactcatttagtataattaatgcaagatatgtacatcttgtctaatattaacaggattcaggaatagaggcacctccaagatccacgtccgggtctgttgcaaattccaactcaagagcaaaaaaccttgttcagatcgcataacggaattctgagttctcacggtctgttaggtccaaaaactcgtggttttccggaacgacgtaagcatcacccaatgcctccctctccttgtcgcgtcggcgattctcccgttgcgatatccaccagataatgcacaagtcgagcgtgacgatgaaatacaggatgcagatagagattttggccggcaaataccctggggcatctttggcttggaaggtctgtggcgagatgatgttgccgacagtataggcgatcgtctggatgcaggacacggtgatcttcttagttgagccagccacattggtactggtgagcccaagaatcgtcgtccatccgagtggaatgcctccggtgaggtagtatcccacaagcgccggcaccctgttggttgtcgccattaaaagcgaccccacgattcccacgatatgggctacaatgcaccagaacagtcgtcgttgtgtcttcattgccagatatgtcaggccaatcagaacgaccacctcataagcacccaggggtgttacaagcaggagactttccgttttcgagaagcccatgcccgttaccatgatattcccgaaactcgtggcaatggaattcggcacatttgccgccatgacccagaaggcgtagagccaggtgtgcgggtcggtaagggcttcgtaaaactgggcttttttgaagacattgcttccgatgccctgtccgttaccccgaagacgctccgcgtgcattgccttttcttccggggacaaaaagccggccgttaaaggggaatcgggcaggaggaagaagaaggagatgccggtcgctacggtcagcaggcccaagatcaggaaaatgacctgccaacctcgcagagacgcgcttggatccccaccgatgtgcgttgctacgccgtatgcgacgtagccgccgaacatctgcgcaaacccacacatggagaaccacaggccaacgcggaaggcctgttcctccttccggtaccactgcgaggtgaagactacccaggcaggtatgatggcggcttctgcggcgcccagaagcgtgcgacagaccatcagggaggcgaatgacttgcatgcggccatacaggccaggatggtgccccagatggtcacgttgacggcgacgtattttgccagggggaatgattgcatcacgcgcattgtagggaaggcgaacgccagctgaccgaaaaagaagatactcgacacccagttgaattggttgcccttgaggttcgttgactcgcgcatccccgtgacactggcataactgatggcaattttgtccagatactgcaggaagtacacgatgcagatcagtggcatgatatacatatcaatcttacgcaacagtcgtgcagatgctgcgggatcgagaacgctcggcgaaccgccttccagtaactgcaatgctccatcgcctgatgtagacttgacatggggggttttttcgtcgagtttgggcgagacgctctctgctggggaaattgttagagcggtcatcctgacggtagtagcgatgatatccaccaagtgggaattcacagaagagacttacgtttgccttaagtacctcgtaacggctggggatttggccaccaatatcgatgggctagcacgccatcaccctccgagctgtcacaataaatcctaacagttgcgatttttgggtcgtaagtgattttcttggccgtagtgggtactcgcaagcgaggataatttatctcaaccggagccccgagcttgaccggtgtcaaccccagcgatatagcaggttgacttatggagtaagagaattcaaattgaacatcgcagcatctcaccaggctagatatagcccaataagcattctaaaaggaaatgcttagtaaacaatatcattaacaggatccgttacacgtgggacccaccgaaaacaagggtctgatcccccggttacccactacgggtagggtcggatatccccggttcccaccccgtaagccgttctatacaaaaggtacataaacacagcataacattctcaaccatggaaccctcaaggtgtatacatctatagatacatgtgtatataagggttccattgaactacatgtactcctaagattggatatagatatagaaaacatacttgatatatatttcataacaatccgatattcgtatcattcatcccaacataaaccttggtccctagctcaataaatataaatacaagaagactaaaatctaaaccgccgtgactatctatgcaagaatcaactcccatcccagttcctccacaatatctaaccaatgcacatttctctgccgaccaatcccagtaaaccgagcttcagaattaacatcctgtctcgcccacaagatccccaataaatcctttgcacgcctaacattcccaatcccaaagttatcctgtagcttgcccaaggaacgaagcacaacctctctgtccgctacatcatcactctcacacccgcagataaagatagggaacgtgagcgccgagtactcgcagtggtcacccagcgggaaggtttcaatgcggccaagacagcggtagacagcgacatttttcggtgtggagatgagaggaagccagtcttgcgctgaaagagatgggacctcctctagctgggcgtttacaatggcaccagggctggcagcgggaggggtattaatgcgctccatgatcgagtggagatagacaaatcctgcgtcacggaagcattcagctacgagttgaagccgagttagggttgctgttggtgttccttgggggattgtgtagggaattgaagtgtgagaccaggcgaggagggattcgtttctgagatgggatgttagtgcggatgttcgactggactatttcttctgtaaccggagagagagagagagagacaaacatggatgcaacactgagtcgaagagccaacgtatcagcttggagagaaggcagctctgcgatacgggcacataaattgaggagttcctctgtatatccaatatagatatccaattttgggatgccgatatcactgtcgacaagaatatccgtagcagtgatacaattgcggttgctgattcggcccatgttataggcatacacgaatctagatgttgatatattatattagcgttcggtaatataccttgcagggtgtcatacatacagtccacgaaggaactcggctgcatctcgatccattgaagcgaatccaccgcgtgaaacgatcagacgttgcaatgcattgagatgaacaacccactgcttaacgctaccacgcacgatctcatatttgcacaatagaccgactgctagcatggcatcgtcagggaacatctccactgaacacttgtctagtgctgtgcggagtccattgagcgttccactataatatttgagtgcagctgtatgtgctccaagcccttgggagcgatttgctagatgaagagcagagatggcacatacagccttcatcagcagaggtgatgacattgccctggggatcaacaacgatcgaaggggattatcatggctttctagatttgctatcagtcgagatccctgctccatgtgatattggaggaagtgagtctcatgtgttgtgagatgactgatatatccttgaagctgtgggatcactgcgacagagttatgcaaatctatagtcgggctaggactgtattcttccgcatcttcaatcgaactggtagcttcctcatacgagacatatcctccaggagaaaatggaacggaccagctcaaggaagtccccggcccaggggataaacgagtctcaagccatgcgtccgatgatggggacggtgcaggcgaagggaactgagatggcgaggacgcactgagccgtcggcgttttgaagtttccgtctgtgagaatacctgcgccgatggacttagtggctccacccatatagagccgtagccctcgcatgcccggccttgcttgagacaattattgcaactgaccaaatcagttacgtaactaaatcaaattctaactaactagcacgcaccttggtttggttttatcacaggccttgcgcctctttttgcaggtgatgcatcccgagcgagtccatgccgtgccagattgccgtttcctaccctttttcggggcggaagtgggttggccgggtgtgaaggaagacgattgcgccgagctattcacaggaaaggcattcatagtgtcaaggggcgcctgggggatatggagatgctctaacaggtactattgacagcatgcttatcgcagatattagacaaattcagacatgcatgcgctgcgcagaggaagatagataataatgtatacggcagtgccctaggcgctgatttggtcacatgggcggtgtaccgacggtaacatctgccgccgccgaaaagccggcccggcacataactaatggggagtagggaacataggaaaaataggaaagtaagaaagaatataaaatttccgccctggtaaccggggttgtgtgaaagggagtaaggcctcgctgcgcgccatgtgctgtactgggacggtcgtgaggagacaagaagcaacaagaagaaagacatggcgaggcagacgacaaacaccaccactcctttggattaccctatggtctctgagccacgggggttttctggcaggctcttcgagacggaagcgactaacgggctcgtctgccgataatcttcaaccactcccggccacaacggcggacatgctcgtcttcgcaagcacgctgcttattagaaagcggaattaccgctcccccgcctaacgctagacttgcagcagaatcaccaggtatcaggaatcgtgatttttctacggagtagattccgtagtcattgtattcggtgtcacgtgctaggtcttgcaaagaagagtgcattcagttcaaaatgacgaagatagagacctaaagatgaagcaagtgaagaagcaagagatggactgctcatatagctggcgcttctgtaaaatttgcaaacaatctatggaataaaaaatagtaagcgaacgagcaaatgaacgaaaaagcaaacatgaagcatctgatagcgatctatagtagatcgtgacatccgggataccgtagtagtatcaaccatgataccatggcttcttgcttcatactcacttattacagtatcgaaaatgcggcattgtaccattgctacgtagtgatccatacgtaagagaagtatgtatcacttatcgatagcaaatcacactaaacctaatttggacaatttcacgccgaccccacaattgtggattagagatcatgtgactttgcgctttaattgatctcctcccatgctaggatcaatcagtgtagatcattgagatagttgaattaaattaaaatcaaatttgtcagttggtcgagtcttatcgctatgagtttaactccgtatctccatctttactccacgttgccctaatctatcagagccaagactcttcttctccaactgccctggtttttttacccaatcaggcaggtccagccacaccttatgtaacccgataagaggcccggggcagggcccctcaggtgcgagatatttcaatgtacaacattgggggtaaattctctcattggatacctttcttgccctctttccttgtcccctcccacttctctgtggattcgtgggatatttccactctaatacttcccatagccgcctcagatctctatttctgaagtgtaccagaacgccgccaaaatggtaaccaaccacggcccgcacccattcgacccaatcacaccggaggagatcaagctcgccgtacgcatccttgaggcggccttcccgggtgtctctctgcgctacaagcgaattgatgtcaatgaacctatcaagagagatgttatcgcatacatcgaagcagagcgtctacagcggccgctacccccacctccggcccgtctcctctatgtgctcttccaccgcctggacaccggcgcattctacaaggctatcctcaatgccgacaggcgcaccattgtctatgccaaggagcttcccaaggaggtccaagtacgcagagcccctctccctcacgatgcaagcaatgggttaatcaatatttccgctctatagggtcccattgacatcgatgaaattgccggaattgaagagttgtgcatgaagcatcccgccgtactagctgagatcgagaaattgcagctgcccccgggcatcactgtttgtaatgacccttggatgtatggcacagacaatgacaacgaggaccgacggctctttcaatgcttcatgtacatggtcgaagtggatcacccccagaacaatcactactctctgccttgcaaattctcacccgtgttcgacggtctcactcatgagttgatccgtatggattacctgcctggtggtgctgatttcgagactacctctacccagccttggaagcctgtcaaggcaatccagtacgctcacgacctcttggatgagccccttcgcaccgatctcaagccatatatcgtacaacagcccgagggcccttcttattcggtggatggcaactccgtctactggcagaagtggcgcttcagggtggggttcaacgctcgggaagggttgattatctacaacgttacatatgataacagaaacatcttgtaccgtttggccgtttctgagatgactgttccctatggaggtgagtcggattggagcctcatcacccctaacccccggtagatctgacgcacatgcatctagatcccagagccccctaccaccgcaagcaggcgtttgatgtcggtgacactggttttggtatgaatgccaatcagttggctcttggatgtgattgtctcggccatatcaagtattttgatggttaccgcaacgactccaaaggcaacccactgcacctgaagaacgtgatttgcatgcacgaacaggataacggcttgcagcataagcataccaactatcggaccggtgccgctaccgttgtgcgcaaccgccaattggttctacagatgatttgcactgtggccaactatgaatatatctttaactacatctttgaccaagccggcaatatcgaattagaagtccgggccaccggaatcctttccaccgttccattcgacaacgagaatgggcaaaccgtcccctggggtactaacgtcggtcctggtgttatggctcctttccaccagcacatgttctccctacggattgaccctgctattgatggatttaagaacaccatctattacgaggatagtgttcctatgccagaagatgagaataatccataccttgtgggctatacctccgagtctacggtgatgcacacggcaggcacagcaaacaccagcgtggatcgccaccgcgtcttcaagatccggaacgacaatattaccaacccaatcacttataagcctgttgcatacaagcttatggcagctcctagccaaatgcttttggtcaacaagaaggcccacggcttccgccgtgctgagtttgccaccaagccgatctgggtcacaaagtaccaggatgatgaactgtacgctgcaggcgagttcaccaaccaaagccgccgcgccgagggcgtcgaaacttgggtgcagcgcaaggacaacgtagagaacgaagacgtcgtcctttggcatagtaagcattccttcccacgacttgatctgtactgtataactaacaacccctgcagccttcggtcttacccacaatccccgcattgaagacttccccgtcatgccgatggagcgcattagtgtcatgctgaagcctgatggattcttcaacaaaaacccggctcttgacgtccctcaatcctcccagttgttcaacaaatcttcactctacccggaggagaagcctgctgcctgttgtgccggagcttcgtctgctggccccaaggccaagctgtacaagtgcattgactagctcgatttcttttgaacccatagataccccatacccccatcctacggttcaagcactattctttgttttttttttatgaatcggcttgatgactcctttgattttcttactacccttttcggttggccttaacgataccttatgatgtaaataccacctctataaacaccatgtttcgatcaatattttcctacatttaatgccaaatatatcgactgcaaggggagcaagatactagtaaaattgtggttatatctattgttgaattactttgcacgtgaactgatatatattgacaacggagtagtagataatagtgcacagaaaatagcagatggcctcatgtaaaaaaatctgtggaacgccgaaatgaaaatggacaagaaaatagatgtagagcacaagataaagaaaaggaggaagagatctcaatgtagatccaaaaacatatcgctaagatcatttcttcatatgatgactagcatgctgaaagcccgaaaccaatgatgttaccgacggcccgagtcagagctgtgaggaacatgactctcaaacaggtcctcaaggtatgcgctaggagcacgaccctgcggcgcttgattgaggttcaaggaactcgtcgaggcacccacataagagtggcgctggttatgcgaatcatggtagacaccaacaggaggcagagagggcgacgataggccagcagtgggcgagtaaagaggctctccatttggagcggggttggagccaccggcagcggcgtagtatccagcaggcaggtatgttgagccacgattccccgtatttcctgtagcgtgcggatttgcatgcgatccagtagggccgcctgctgtaggtgaaaagaaaagaccgctgcttgtgctcgagacccggttgggcttgtagcttgcgcgagtggcggtgccgagtttatcgagagatacgtcggccaccggggcgacggggtagggggttgatcgcttctttctgctgccgcgcaggaggcgcttggattgcgaagcgtgccttactgcggcgcgccgcactgagcgatttacggaccatgcgaccattgcgcgccacgcgagcagagtgaggccgatcagccctagcgcggcgccgacggcgatgaacactgtgccttctggagcactgctctctttcatatatggggcattggctatgggtggtatcgtcacaacagcgccggttgtggtggaggaggatgttgatgatttcgttgtcgtggagacggatgatgtagttgtactgctgtcggacgtcgtggaggaggaagaggaggatgtggtggttgtatccatggttgtacttgtcgaagaagaggacgtcgtactggtggtagaacttgacgtcgattgagaagtggttgaagaagtggttgtctcactcacgctagaagtgctttgagtggtcgaagggtcgtcggtggtcttagcggcatcagtatttgttgttgtatcgtccgctggtacggcagacacttgagcagcgatgacaatgaccagaaatagtagcagtagggatgacggcctggctgttccaagcctttgcggtagaactcgcatggcagcgtaaacaatcgatcagctgctccacaatgtgcgggtcagtaggcgccgatcccaacgacagcgaggaacaaagcagattattatcaatttaaatcagcgcatcaatgaaatccgtttggcaaatttaagatcgctgctggttccaacaatgactgcggtctctcgtgaaatattggtagatgcaggtcaggtcacggatcaacaatcaacgaatttccatatggggtgaggcgttgggaaactctcataaacgaatgactgttgttcaagtgaggccaagcagttccccgaaaatgactacaagaagagacctttctaaccgaaaagacgccaacgctaaaggagaggggtgccttaggcaaccctgagattgtcacctgacagtcaaaaaaagatacaaggacttgcgcatttacgttggcaaatctaacattcgaaaaactgggaggatatgagatatcatacatgggaatacaaggtaattgtccctgaacccccgataaaaaaaaaggaaatcaattgcagcaatgggtggaatccaaaaatataacccaacaaagcgctacaaatcactgcgctttcttttgcacagcagccgaggtgtccttctcaaatgcggcatagggaatctcgaggctgcttagagcaccgatgccaatatacaaaattgcgaggaacaggaaggtagccatgagtcccatgaagatgcctggagaagggtgagcatagtgaatagatagaaggtgggattgatagatacatacctggggtgaagtattgatattcttcgaagagagaggtggaattggccgactggctcgaggcgctgccttgcgcggagtagtcccgcttgagctccatgtggagggtgtcttggtacgaatctccagagatgtcgtagatgacggaatccgtctcggggaactccctcggtgaggtaatgtagagaatagtatacttagacgaggaaggaattcgatcggcgacatcggcaaggaaaccatctagcagagttagtgagaaacaagtgcataggcggactgcatacataccaaatccagaaagctgctgtgcgcggtcggaacctaacgatagcatggggaattcgacatcaataattcggggacccttctcgaagtatgaggggtacgatccagcttcacattgttagctctgacgtccttcgcgggttttgccaagttccgtcgttggccatcaaagcaacttacaggaagcgtcaacggcggtagtctgggccttacacttctcctccagaatgcttttgacatcattgggttgaaccaggccagcgacctcgttgatgctcatcttggaccggatcgagctgtctttcccgagcatcttcgcacctaagcggggtgccgactttcgcgtcgagaagtcggaactgtgcacaccaggctggtagacgacgacatagtaatctgacggacaggtactgagagatgaggaaaggttctcgaggagtgaagttcctgtctggatgtaggcggaattcgtcaagaccctaagggaggaccgattagttaaccgcagcgcgagagattcaatcaagcatactcagaagttgaggcgaggaagaatggcgaagtatctctgaaagcattcacggcagcagccccaagggccaatagcccgaaactgctgagatacattgtgtttggcgtggggatgggtcaagttggcgatgatgttgccaacgggaggtgtccgacttggcctcggaggcggtcgagaaccccgacccgcctgagctttccatatcaacttttttttttttggcttttgacgcagtttcaacacaacctacgatatacaaaggtctactctcgattcgatccaaatatacttgagattgggattttcattcaccatgggtcccaaggatttgaaaaagcgcaaaattgttgctgggccgaaagttgaagaggtcaatttcgacgacgaatcccgccatgaatacttgactgggtttcacaaacgcaaagtgcaacgggccaaacatgcgcaagacaatgccgccaagagatacaaagaggagaaaagagaagcaagaaaaaaggttcgataggcttcaatttgtgcccaaagacacccactaatttttctagattcgagaggatcgcaaaagagacttcgaacaggcaatggcggagcataaagcagtactcaagcgcatgaaagaagatgctggagatctcggcgcaatggaaggcgagaaagaggaggaagattgggagggaattgaagagcctccagcagtggactacgaagccgaatacgtcgacgaggacaaatacacaacagtcacggttgaagaaatggatgcatcccgtgagggtctgcttaaggctgccaggggggaggactcagaaaatgaagaagagaaaaaatatccggtcgagtcgacagaggatgacacaaaggccaagaagagaaagccccggagtgcagcctcagaagcagccaggaaaaagaagaggaatttccgctacgagaccaaggttgagcgcaagcaaacaatgttaaagcaaagggctgtgaaagcgaagagagcaaaggcgcgaaagggggcagaggaataagggaaccacatcttgaaagagatacgacatcacatgtgcatatactcggcttcaagcaattattcattagtcaattttacagatcataggcgtttgacatcatgggagatacaaggaagatgcaggaaatggtagacaccgcagtgcacgttgcatgataaaaaaaggtattgctatcaaaagcgctgtatccggtccatacacttgggaccagtgtaacacaaacagtcacagcatgaaaaagcagatgacaaaccagagaatgaagcttgtatccaaccatatgtttcccgatatcctgcacctatcaccggttcgagccagcttagatatcggccatctgggatgcaaggtcgtcaagctccttcttcacagtgctgtgttccttgatcgcatcctcgtatctttgctcgagcttggcgtgttggtcctcgagcgcctgcaccttccgctcgtagtgaccagccttgatatccgtttggcggagcctaagtgcccaatatgtcagtatgtaactgtgaaagaaccggcggctgatcgtacttctcattggtttcccgcagagtcttgtcgttctcctcggcctcctcctcaagaagctgcacccgtcgctgaagggcctcgttctgagtgtcgtgctggaggctctggctggcagcatccttagcctccttgagggcggcctctgtcttctcaacctcctcctctagaagctggttgcggtggttcagggatgtgatctcttgttcttttgacaaattctcctgttccaaggtcttgaccttggccttgagctcatcgacgagctcgtgagcctcatccgcctcagcgcgaagggcgaccatgcgctaaaataaataccgacacattagtaaaatattcagtggagaagtgatggaatgctggggtggtatgcatatatgcataggaggaggggctgtgtgattttgggaggcagtcaagctaccccgccggcaggggaaatgacttacctccttgatcttgtccattttaacggtattgaaagggagtaaggaagataatatgtatggttgaaaagaagagtagtttggctttcgctcagcgagaaaccgggcgagtgttggatgggtgtggaagatgatatggggagagttttgggagagaaggggaggaataaaggctgagcagggaacaagtagacagtactagcccaacacgtacgagctccactacaggggaagtaccggatacttactgtgtaccaacggcgtacccgtggtatggttaggtacacaatccgctctggctcgcagccaatcaccgcccaaggatcgacgcgtctccacgggcaaccacttgacaacacttccagggctgcatctagaactgtgctggctcttgattacactcaacacacttacgacacgacttggatttctttgatacggtgcatgagaaccaacagcttcagttggccaccatgttggctcttcgcgaccaggaaaacctggtaaatacccaccagaccgccgcggctgctaagcccttgaaccaaagcaagccgctggcacccaagacacccggcaaggcacgaaatgacgagaacaacccactggcatttggaaaccgcacggtgaagggcaatgggaaccgccaggataatgggaaaccgggcaacaacgcgttcatgactccaatgggtacgcgtgctgcgcgaaaatgacagatttgcaggtgacgttggataatgactgacttgtcttctcgcgtatagtgagggaccgagctcctctgggcatgaaaacgaccaatctcaaagccaacaacctccaaacccctgcgccctttgggggaaccaagcaaccgaggacaaaccgcagacagtcgactgcccagaagatcagaaaagctgccccagtgacacagcaggcccaagccaaagtccacatcgatgctgctgcagatgatgtaccggatattgagtacatgccgccgaagcctagaggtacgctaagcacaactagagctgcaacccaaaagcttatttctgacgagctatagatcttccggaccttccagacgatgtgacatatgacactacattcccccaattccaaccgaagaatcgagctctaggtttggagagtgtttacggaaagcaacaagtcggcagcgatggactcacggcgaaacaacgcaaattccaggaggattctgcggcgtgcgataggatggtgaatgacatgatcatgaaacaactcgacgacattggttttgagagctctggtgagaacgagtcgacaaagacacttgagccaaatgctatcccctcaaaaagacctacaaccaccacacgacacactcgcaatgtgtcgacgctccgagctcgtgatgctgtcgctgcgcttggcggatcccggccaactgttgcacctcgagtggccccaatcccaaagccacgggtggcatcgttggcatcgtcgctggttatgcccaagaggcatgccagagtcccgtctaacccatcttccatgcgcaatactgctgccgttgtcaactctcgtacgaccgttggctattccaaaggacgcaatgtgtcgtctaccctgcgtgataatcattcccaaacgcagaagccctcgagctcgcaggtcctgtctcccgaaacttatatgcaactgtatggcccccctccgctggactcggaaatgtggactcgttgcaatgctgctggatgtttcgatgccccggacgagatcacccaggaaccggaagaaccattgcccacgtttgacgaagatgatgaggcccagagcttccagctcactctgtaggggtacattgcgaaagatacttgacatcgacagggggattacaattttacttcagtatggttatgatttggcatgtggagatcgacattggctcatatggtgtaggggtttggcggcaagccgaaggatgccggcgttatggaatagtattaatgtacttgtaactggacaggttgcagcccttcaaccgcagaccaaattgtttcaggcgttctccactctcatgatgatcctttgccaagaggtagacaggcgagggtcgcacaccaaaacttgattaagtgtgaatcctcaatcactgttaatcgctgttgtgttcacacaatttttatgaatcggagaaacacactacccactagctacacggaccccataaatctctgcgacaatatttcacgtaccttagtggaattagtggaaaaaatagagcccaatggacgggagagtaaagtaaactcggtgtacctcgcgggtaccaggtccccagccaggccgcccgggtaacggcaagtaccaatcatgtacttccaggtacataccttgatctagcccacaccgccccggaattgcccataacttcttatttactctctggcctctccttttcctctcccattcctctcaattgacgcttcgccgccatgacgaccattcatccggactccaccgaggagttcgaatacatccagactccggctgcccccgcgcagaccaagcctgccttcgattgcggtgtcccgactaccctggtaagtgcattcctagagctatccgtgaccgatgtttggtgattccagggcctaatttgcttcatttccattcagtacccgactattaagaatgccccagttcctgccgactctcccggcagcgacagcttctccaatggcttgatgatcgctctggagatcatcgtgccctggtggctggctcgccaggttggtggaggtttctataccaccatcttctttgctctcttcacctcagttcccgtcctggtggcattctgggctgtctcttcctccgtttctcctcgcaagaccgagaaggccaagtactgtggccgccccgtcgagcactacctgcagttccacagcgagcacgatcgtgctacctaccacggcaagagcaagattcccatggaggtcttttatgagaagtacttcaatggtgaggttgacttcaagggcgatgctctggagtgcctcgagtaccgtcatgactgggccaacttcaagttcactactggtcttttcaagcatttcctgtttggtttcatccccgagatgctgatgcacactcgttctcagggtaagcgactcttcatgcagctctggtggcaattctaacattgtgtagatgaggagcaggtccgtgatcactacgacagaggtgacgacttctacgcttggttcctcggcccacgcatgatctacacctccggtgtgatcagcgatatcaacagggaggagaccctcgaggagctccaggacaacaagctggccattgtttgcgagaagattggtcttaagcccggtgaccgggtccttgatcttggctgcggctggggaacccttgctaaatacgcctcgacccactacggcgctcacgttaccggtatcactcttggccgtaatcaaaccgcgtggggtaacaatggtcttcgcaaggctggtatcgaagaggaccagagccgcattgtgtgcagtgactaccgcgacgctcctcgtattgagggtggatatcaacacatcacttgtctcgagatggccgagcacgtcggtgtccgccacttctccactttcttgtctcaggtttacgacatgctcgacgacaatggtactttcttcctgcagattgctggtctccgcaagtcctggcaatacgaggacctgatctggggtcttttcatgaacaaatacatcttccccggtgccgatgccagtactcctctcggttttgttgtcgaccacctcgagggcgctggctttgaagtcaaggctgttgacaccattggtgtgcactactctgctaccctctggcgctggtaccggaactggatgggcaaccgcgacaaggtcgaggccaagtacggaaagcgctggttccgcgtaagtttctctcaggattctcccagtggatctttctgaggtccatgcactttcttactaataatatctctaattagatctgggagtacttccttgcttcctccactatcacttcccgccagggtggtgccacctgctggcagcttacccttgttaagaacatcaactctacccaccgtattgagggtatcgctactcagttcggtcttgctggagctcgccagagcgccatcgaccgcgctggctcccttcccaaggcccacattgtcaagaaggacctttgaaggattgatgtacaatcatagccatcatctacttctccgagggtacatatcagtccccctcagactagtatgacgttacgtgaggcgcggcaatatgctgatgtgttctactgtgaacatattcaaacttataaccaagcatgtatgacatgagtgacatgacgcgaggtgaggtgaagctaggtgaaattgaattgcgtgagtggtcgtggaagaaaaaaggcaggagctggtagcgaaagaagcatggatagtcagaggtctatctggctggtccgcctggatatctacttcgatatttatctgtggtcgtgcgtctatttcttatgcctcaccctgtctaaggggaatatttgtacgaagtcaacgagtctgtctttgtcatgttattttttaagaagtcaatgactatttctttggaccgatacttgcagcatatcccttcgcttcttcgcttcgaatcagtaagattgctccactgagcccatttcacaggtgaccagttagagtttgtactaaggccatggagctcgcaagataatgcaacagaattctagggcgtcaactttctgctggcatcaaactctaattgtatcgtctaaaaaagtcgtgatatgtgtctataaaccgaattcgagtcttcaatcattaggttcgtcaatcaccaaaactttcataacaccaattagatttctcgacagctaagcgtcgagaagcaaaggaaaagaaacaaaagaccaggattgcgatccaataggataaatggtatatgtaaagagggaaacaaaggcaggatagatgcagacgtcagacccggttgaccctaggtaagtattggtacagtgaagagtaaacagaaatccagggaaatagaaattcatgcttgtcgcaggcccagagatccaatccaaggagtctaagaaagcatcgtgcatgaggttacacacatctagttgattgacctccaaaagaaaacaataggcgtacaagggcatgtggtgaggtgttccacacacgccgggtggaaaaaaagaaaaagaaaacaagagccaagctcagttctcatctaccgctgctctagcattggattgggtatatccggggttttggttagggcaaaagaagcccgaagactcgaccgttgtgttgggttgagagggagagtttttctgtgtcgcattctcgttccaaatcgcttgagatactgatcaaagacgaaaggtttaggtaaatttagtccgcgtcgaatttatggttgtattctccgagaaggacgtcatctgggcccgggccatgggtatttcgaactagtgcacagaagcgtgagtggaattgtccgaaaaccaggatagtggtgcatgggtcacacggctgggatcagggggagtgcggatgcacaggggggaacatactccattcagcttccgtccggaagaacacccacatccaacgtcgtacaacttcgaggaacatgagtatccataatccgctttcagtctccgaaatccagccgaggcctgggacaatgcgccatagccatgagaaacgaagcgccagatccgcgataatgacgtagtggtacatcttgtcagatccgaagtaacgatgccggcggagtccatatggatggctgctgtcgcgagattccgaggaaaatagagtcatatcccaatccttgacgacatcccaccagaaagagtagccggagttgataaaagagacgagaaacctgggggtattagagaaggcatagacacaacacatgagggatacaatcttacagaaggcgcatcatgctaacctcgctatatccacgtagctccaatggattgtagttgcgcattttggaggctatccaaatgaccgggaacgcacttgcatacttgagagcgttggccaagtgctggtttaacttgtgcgtctctctccgggtgactgtccgccgcgcacgataatattcagtcaaacactgacgaagacgaatcaagctaggaacagcgaggatgatcggaacgacgatttcacttccacaggcccggttgggcttggaagtagcggcgaagccatcggtgaagaacatgcagaagctgatatacagatctccgatcacgcgagcatagctagtgagggcatctgccagcagaatgtcaccaaacttgccatccttcgactcggccagaccgccaatactgatccgcttgagggtaaggagaaaacggattcgaccggagcgggaggcgcggttgaaaggccagatcagaataaggaggagaacgatgtacaccgactgcgggagccagtccagtcgctcaaccaattcaggggctcggcgagtgactacccaaaagacgatgaaccacagagcaagtgggatagtaaaacatgtggccaggcggtagacggcgatgtgatgtgggcgttgcgaggaggatgtgcgggcaggatatttgatgagcgccgggacgtcctggaagtatgggaatctgatcagccgtcgggaatacgctggctaggtgaggggcgtcactcacgatgttggcttttgccaagtattgaaggttgagtccccatccccagaaacctagctccttgtgttagcacactcgggaccgaacccgatcggacaggaatgtcacctaccagcgaccaagatagcagctatacgtagcggtaaagggaagatcagcccaaaggcatccaattgagcatgttgatcaactgccattattccattgatcaggggggggggaggcggggggagatcgcaggaggaataaagggttggagcagcaacaaagaccccttggatatgtaaccaaaaaggaatgactagaggtgagtcgacgtctttgaaagtccggaagttgagacttttccagtttgaagccgctcagggcagtttaataggcggagaggaggagaatacgcgcctggactagtcacagtccgcggatggtctggaaccccacagcgtcaaattgggtatataaaattagaactcattcgaagcacatcgggaggaagagcctgaagcgggcgatttttacgggatgtaactactgccagaataccaacgtatccatgtcatcatcggatcaaagggaagaggccaaagccatggacttgcgattcaaggcccctggatttcttcaggaaaaggggtaccgaggagagttaccaaatcaggtacattcagccactcgaaagcctcccgcattcgtctgccacaacgtccaacctttcagggccctgggaggttctggcggtggggaccaatgacgcttgcggcgtatggtcaccgtgttacggtaagttacgggtatttttgaaattatgtcattgaggtcatggggcagtcaagagggcacgtgacactgatctaaccataacgggaagtcagctgatgtcactctataccgaggcatcacatccgagggcaactccggggaaattgtgatctccaccaggtacgaacgtcggggaattgagcctgggactcgtcttggtagctataccaaccctctataacccgtcatggccgacgacgactcccatctctctctatcaaccccgaactcagccctcggctcctctacctctcacttctaccctttcgcaacctcaccagacatcatccgctcgcatgagaaggattcattccttacgggcagtctaattcaacaatctcaagggatcgttcgtgctctccgcggcgcccgatacgcccacacccactccgacgccatcaaacacctcacagaactcctctacttctccctaacaaccgccatcggcaaccgcaccctaggcgaagaatactgcgacctcgtacagctagaagatgacacacttcaattgccgtcaattggccgtcgcgtggggtacttcttaagcagcattctagtaccgtggacactgcagcggctactacctgcattgcgacagaggatccgcaacaagctcgagcgcaacattgcacgccaacagtcacgagcggcgcagcaggctggcctgctcaacaagccccagttctcaaccaccccgactaaacggccgttgtttacgaaactgcgcatccagcagtatgtccttgaacacctggactccatcacatccttgtcgcccatttatgcgctgagtattgccaccttctatttcacaggctcgtactaccacatctccaagcggatttggagccttcgttacgttttcacgaaaaagatcgacgacaatgagcagcgcatcggatatgaggttctgggtgtgttgcttgttctccaaatcgccgtgcagggattcctgcacgcccgcaaactcgccgcgagcatgaatgaagatgagagcgagtctacagacgctggtcagtctccctcgcagggtggagctgttctcgcttcgattcagaacccgtcctctattcctctccttcctgcgtctgtgcctctgtatgatctcgaggaggatcctggcgctgtctcatggattcccgagggtcagcagcggaagtgcaccctgtgtctggaaatgttcaaggaccctagtgttacaacctgtggacatgtcttttgctggatttgtgttcgggactgggttcgtgaaaagcccgagtgcccgctctgtcggcaagaggtcttgctatctaaggtgcttcctctaagagggtagctatgtggttagcaataagttataggctagtgctctcattatcatgactatcgctgaagagattagcgcagtcgatacatgtgtatacacttttttggacaaatatataccccctgtttctatttaatccgagcatggtttttatggactgtatggttcgattgaatcttgacatagatcacccaacatgcatttctacaacgtacatatagatcgagggcaggacacaaagcaccataacaaagggacgaaataaagaaagaaaaatgcctctctagatcgaaactgcacaaacatataatcttttaaaactttggcaaaataaaagagtgggatattgaagggataaataaatctaggtacatgtactcagtatgcatatatacatggtcaaatcagtgggtcctcttcgccgttgaccgctagtccaagtggaagaacaatgggttggttgagttcagcgaatgcgggacgaggtggcattgggtccatggcttgtcttttcgcttccatgatatggaacagacgaacgcaggcgtacggatcggtagcagcatctaaagaagaaaacaagattagcatccaaggagagagattgtgcaaatcgaagtactcacattgaacttgacgataactcaaattccgagtccaatcaccgcagcgcacatcgtcacttttctcgagagggagaccgaaatgctcgtttacttgctcgctgagattgacgcctctcttgttcaccaacttaggattgtctttgccgtatttgatcaacttgtacaaatgactgagctcgaaggtggctttggcatcaatgccgagatacttgcgcagccgtgtgcagtctgccttgatcgaaacacccactttaatgacgtcgggagattcaacgaggcgtctcaatgacggagaaactaggtcctccagagaacgtgcaggcttgaagagtgcaacctgaaagatggcgatacgttcctcgtttgctatttggatcaccgagacattgctctgaatgctgtcgaagcctgaggcttgagccttccattccatgtcgaatccaatgactttgctcccgaggaagtgttgcacggcttcttcggtgctttgaagggtccggcaataatgcacgatgagttttcggccatcggggctttgttgtgaattatgggtccagaactggggcgtcgtaagattgctggcactggaaccaatgtctgaagatggaattggctcagccgtggaatcattttgttcagcagatcctgatccgttcgtgggatcccggaccgaggacaaatgggtttcaagtggccgttcaaccagggaagtatcactggcaccactgctttgtcgaagctgtgcttggtggaaaattgcacccgtgctatactttctcccatcgtttggttctggtttagcgaatgttttcttcggaaacatcattggtcgtagtctgttacgtgtccttgtgcctgggaagtgagtgctggtttctcttggacctggcggacggaggtcatcaagacgtggctccgtgctgaggctcacgtctttactcttcggaggcataggccgtggcttgggaagaactcggctagaagccgcattgaccaggaacgggttggactcatgcgcgtcgaggctcctaaagtttctcttccgggatttgggtgatgacttgtaaatgacctgactgtcctggccgtcctgaccgtcctgatcggtaggcgcattgactaggaacggattgaactcatgcgcgtcgagactcctaaattttctcttccggggtttaggtgatgacttgtagatgacctgaccgtcctgaccggtaggcgcatcaattggcagtggtttgtattcaagatcatcctctgttgtttggccctcagtctttattgtcgacagatcaggaggcactccgtgttcaaggcggctctccccttgactgccttggtcagcagctgactcggctgcaccctcttgttcgattcccctcctcacctgcgttctccatttcaaggaactttccttgggtatcacaactggaccggacgtttgattgccctgattcgtaggcggagactcgatatggctcaacgatggccctttgatatatctttcgagacggctttgagataattcgatgaaagcggccttggcagattcggattcctctcgttccctacgtctggcctccattgtggaagaacctagctctaatatttgggagtttacgccaatgttgcgctcaatctcgtcgtggatgagctcccactccggccgcgttagtcggctggccatcaagggaatataagccccacaagcgagctggcccatgcgatcggtccatttcttgaaggcacgggtatcctgactcagtgggttgagcacttgaaactttccagcaagatagacacgttgtttcattgagcgtagcaatgattccgatcgaagacgcagccagtttagatgtatgtattcagacaccatctgtcgaagagcgctgcgatgtttctggaattctatacaccagtcggctatttttgaaacagtggaaaaccgagtctgcccagagaccctagtccacaattccccactatcacctctcaggctgtggtaaaggtaccaaacttcattttgaattccccatgtgacaacttcagtcatgagcagtggcgctattacatccaattgtcgccagtagatatgtagcttagggctgcgtggcggttttggcctccaaagctggttgtattcgaggtagatcttgttggatatcaggagtggactttcgtctaagtaccgagcctccggggagtccttcggggcacccagcgcaagtgcaagcaagacccgcctgtcagtagcttcaggagaacgtgcggacgaaactgccgtcatgaaatccctcaaattccatagttcactgtgtcgaagtggatgcgaagccatctgcctcctgagccaatatgcacggtggtgatgcgcacatttactaatttcgagataactatgctcaaggatttctttgtactggccaaacacccatttatcggttgcgcgaaggttcgagcgtgcttgaagggacgagcaaaggtccctgataggaaaaattcgtgtgttatcgctcttcagtcgtaactccacgtagttcttctgaatcagattgctttgatgaagaattctatcaatttgttttcttgcggtattccggggtcgtaggaaatccttgtcgagataatttttcaatcgatggatggacagctcggaaaggtgaaccagaggtgcaaggagtgtcttttgagacgtttgaagacacttctgccaactatggatcttctgggcggacattgccagttcgctttcccattctggagttctaccaaaaacaatacagcagaaaccatgatcaatcattcgacccgtcttctctgcttccgcgacagcagcctgtagtcgttccaatcccattatggaagatgaaagctctatcacttcggcgacatatttttgagtgatcttttctgcttgcagaactaaattcgtgttgtctgagaccatccttacaattctcgcggtgatggtacttgacaggctttccagttcagtcgcacattcttgggtggtcttttcagcatggagaacctgtttcgttatccgtgagaccacatcattgattcgattttgaaatgttgattcgagagctccatattcagcctcataggctagtatggccttgatagattcatcaagaagatcatcggcacgtttgtacttcagctggatataactcccaaccaattcctgataagaaggcagcgaattaagctccttctcaatgtgcagacgttgagagactcgggatttcccctctgctctcgatcggatcaagctgcctaagtctcgatgttggacagggcgcacaaaagcagaccggcctggaattcgttgtaccggttttgatacgggctttggctctggaacttcatcatcgtcatcccatatgccttctttgcgagtggtattgcagaagttccgcttggattgagaggccgtgggcggggcgtacgaggagcttgtattcggtaaagacacatgtcggagcctcgggacagatcgagcgcaagcactgtagtttagtcagaaaaatagccatcaaagctgaaaaggaaataaagtgtgcttactgctgacgctcgaaaagtcctaatcgcagtgacccataggatctggatccatcgatgtgactgctatgttttgcaatcgaagactgggtcttccgacttgctaaaagattcggccgcattggcataatgtgtgacaagcatagtggaccagcctggagccccacaaagcaattgaataaagtcgaattgattgacaaccagtggtaactcaaacgaaagtgcggctagaaaatcgagtgagggtcaggatatgtagtacttcatgttgcgcaaatcaactttcagagtttcctctaaaccatatttggattagtctctcgggtcggattatcaaaggtgccgagcgacaaacgatcacgtccttttctatatcgatcttgcccacgcggaatgctcgatcacctttgttttaaatcaagacgctttctaagaaaataattacgagcacattcattttctgtctcccaacatcatggcttctcagctacttccccttggtccgtgcctaatgacccaagaaagccatgaccccgctaactgatctgatagagctcattgataagtgtgttggctcccggatttgggttgtcatgaagggtgacaaaggtcagctaaaaatttaatggttgagcacgaaactgttctaatgcttatgaagagttctccggcactttgctcggattcgacgactacgtcagtgagtatccctgcataagaagtgacgatctcaccaggcactaatttcgatttagacatggttatggaagatgtgacagagttgtaagtggcttggcttttcgatttttagattcaagctacccttttcccttctgtggctgtgctgccttggctcctacgtctctgcgcagtgcgatttgcaaatttccgcgaaattctcgacaggtcattctgatgattgtgctctggactaacctcctctcagcgactacaccggtgctcaaatcaagctccctaagctcttgttgaatgggaacaatatctgcatggtaggttaaattcacccgaaggccatctggatgctatactaactcttccaccagttgattcccggtggtgaaggccccgcggcaagctcatgagctcgagatacccagtttttgccgtgacgaaaataaaactttgtgtattaatgataccgaatccaacgagatagaacaaagtcgttgaatgaatgaagctccatttcaagcgtgattttatctcaccccagtagcatgtggctcagtattgaagtaagacaggaataagctgttgtcaacaccaagagaatgtgttcttcgcctaaaagcatattcgttattatggctagtcacagcctaggcgtcttccggcgagagggtccagctgcaacctccaatgatatacgaaagcaagtatggagtatgcaggaactactctgtagcccacaaaagacctcgggacagtcagcggtagtcagcggcagccggcagccggcggtctaagataagctcgccaatcagaagtcgtctctacccgagaccagggtatcgacggctaacctcgggcgccgcgcgctccggctattaacaatattggaagcatctcatcgatacgagtaaaggccgtttgccgcgtgctgatcggacaattctttggtggatatcatggtggatgtagagacgcaattgttttgactactccacatttaacgtgttcgatggctatgttgtagtcagttgactgctgttaagtggaaattaatgatggagaaccttaacgagcaggtgattaggatgtgatcatttagagtacattattcaatgaataatatatattatagacctgcctattcggtagatccagacatgttgtagactggccgaatagtagtgccatgccgtagagctcactttcgagagtcagctctgactcacgataatacacgccgtacgtgatgtgatctttcaatggccaatctaaagtaaataagctgccaggaccttggaaaagtggcacttggccagggacaggaaaaggggtcgcggtgcacacgggatgtcagggggctgcaggtgcagtatcagccgtctgcggataatcatggatattcgttgagtattcaccttcaataccccaaattctatcattctgaagatctcggtgctgtttcattgtgctgtctttccccagactccaaagttgactagtcaacaagttatgtggaaactgttacctaacagattgtcatccccgcattttatatgcacctaatgttgacttcgtatttacgacaaggcctgtttattctggtcatgttcaacatgacggtttttgagctgggtctaaactattggataccgagcgcctcatggacttgaatgggaacttccgacttggctgtcgggaaatatgaagatgccgagaaggaatattagaacaaatgtatggagtacaatattggatgtatattgtgtctttgtccattccgtggcggtggcgaaaatcccaatgcgcattgcgtgctgtttggcccgggctggacttatttatggggaatttcgtcggcttgaataacctcaagtgtgaaatgttcggagtactccgaggataatatagacattttgcggggtattacccgtgacttctgttgctcaaccttggaacttgacgaacagccttagaaaggtccacgcgtggccaggtgtgtctaagggggagtgtagatttaaccgattccacatgagcacctacctatgtaggcaatgttgtaccataacccgggcgcagccgctgacctttcaacagtcagacttggctctatcatctatgttgtagtcaccggaacacaaataactagtcatcaatcctgcccgatgctactgtggctgtcttgttgcgggagcgtggccagtaaaatcagctactgcgcgccatcagctcggaaaggcttgggtggctgatagtcaagcatagactcaatccagctcaggccgaagacggtgcgcctttttctcgcccccccttatggtctgaccgcgttgcatggaccaaaccttggaagtcgtaaaattccctatctcagaaaatggtgatgcgcttgacccgcaatgcggacatgcaagataagactggtgggcccgtttacacatttcaatttggccacaatgagcttctctcgagtttacagtcacacgattgtgaacaccttgagatcttgcgttagccatgattaatgattaatgtgattaatgtttcctggacggacatgtccgaatccagcggatgggccacaaaagtctattggcggacctagggcatcctgatcaaggtgttgtgaaaattggccagtgataatacgagggtcttgctgaacacgccgacaccaggccaatcattaagtctatgttgtataatgaacctcctagcacacactcttggctttttgggaggcttctcccgtgcttccatgcatatcacaaaccgccacagccacgtaaaaaccttcgcgtcgaaaacgccgacgcatagagtttgcctacagggtctcgtggcgccatccctcatccccaccagagctcatgccagtctctagtagcgaacccgaccgaggcggtttcaaatgtccgcaatcaatcgtctgcctttctgcgcacatacaacacacacacacaggccaagaggctataccgaggcgacgggcaggaaaactcaattgaggcaagtttgcgaacaagcctcagtggggcgaattcctcgtccatatggcattgcacgcatatccctgtagcccatagcgcatgccacaggaacggggtccgtcgggaagccttcccataggcaagggatgaacgacgagaggaattcccctgccgtccactggtcagcacagtagtgtgagtatgtttcttcccaagtaaggttatctcgttccaaacttagaatgtcggttctgcgagataaaggtcttctagaaggacgagaagcggaaaccttggaactcgcggacactatggaggactcgttccaaggttcaaaggttgccccggtggaggtccgggggaaagggatgtgcccaggtgtgctcttatctcccgaggtttctctgattgggcaacgatcgactatcgtccacgggtagagtgcggagagactgacagatggggcttagtggatctggggagttgcctctttcgggctccagaagcttggcttttccctgtccacctacagaatattaaccagatgaagtcgttcaagggttgttagtatgactgcatggattcagtagtcatgtactacgagtcaggtcatggcgatagtcaagctagggaggtgtagatattagacatccatgaggtagatcctcccgtcccgttatgacagtctaaatcacgcgagagatagataagtagtggcgctaccggggttccacctgcaataattactatttcgcttttaccttttttacctttttgctctaaaacaataagatagtcgggtgaaacactaggtatggagcttccacctcaggatcaagcgggcttatcttaggaacttgaacttgaccgtttgcagccttgcaagggtatctcactgcatatgtatgaatcatgatcaggatcgtgtgtaactcatagcctcgcagaacactgagtaaggagtacaaatgcatcataaatcttaattaaaaagataaattgcctagtcgcggactcgggacccagagcatgccaaggttatcagaagattaaatgctgttagtgcggaactctagatggtctaagcgcatgaaagcagatagatttaggtgcttttgatttaatttgattcgatttgattatatggaacgtaaaaataattccatcgcttttatctgaaatcggactggttgtatttataccctcccccccctcccaaacggccaaccctctacttgtttcacctctgtgtcggttcattgaccttaactcccacagaaccttcggcttcagcgaacagatacttatttctgtcctgaaaaatacccactccagaagagaaaaatttcacattctcaccatggatgagaagaagtttgaggagcacaccgtccagactggatcggatgctcccccatcctatggcgactcatctccaacgcgaggaggcatgggccaacgaatcattgacagcttcaagagagaccccaaccacactgtcctcggtactcctggagctgatggcactgccatggatgtcgaggctgccgccgcccataacactgcccactcaccactgcagcgacacttgaagggtcgtcatctgcagatgattgccatcggtggttctatcggtatgttctgcgctgattcgtctccatcctattcggtctcgctaattacatttactatgtaggtactggtcttttcgttggttccggatctgttttggccgtcggtggtccagcctcagtactgatcgcttatattttgatcggatgcatgctttactgtacagttcacgccttgggcgaaatggctgttcttttccccgttgccggttctttcgcccactattcgactcgtttcatggatcctgcttggggtttcgctatgggctggaattacgctcttcagtggctcattgtcctacccttggagattgtcgctgcttccatcacagtcgattattggagcccaggtgtttcaaacgctgcctgggtaaccatcttctgggttgtgattgtctcaatcaacatgttcggtgtacgaggatatggtgaagccgaattcgtcttctccatcatcaaggtcgttgccgtgcttggtttcatgtaagctacattgctgtttggcgaaacttgaacgtctaactgacttgactattagtatcctaggaatcatcctcaactgcggtggtggacccgaaggtggatacattggtgccaggtactggtacgacccaggtgcattcaggaacggtttcaagggtctctgcagtgtcttcgtcaatgctgctttcgccttcgctggaaccgaacttgttggtcttgccgccgccgagaccgccaatcctcgcaagtccctcccgactgccgttaagcaggtcttctggcgtattgctctcttctacgtggtttcccttaccctcgtcggccttctggtgagatacgacgacccgaaactgatcagcggttcctcctccgccgacgccaaggcctctcctttcgtcattgccattgagaacgcaggaatcaaggctctgccttccatcatgaacgttgtgatcatgattgcggtcctctctgtcggtaactcctccgtttacggttcctcgcgtactcttgctgcccttgccgagcaaggccaagcccccaagttcctcgcctacatcgaccgcaagggtcgtcctctacctgccattattattgcgtctgccttgggtctgctctgctacctcgccgcctccgatgtgcagacgactgccttcgaatggatgatggccatctcgggtctgtcatctatcttcacctggggttccatctgtgcttcccacatcctcttccgtcgcgcgtggaagaaacagggccacaccttggatgagcttgcattccgttcccagcccggtgtcattggctcgtgggtcggtcttaccttcaacattctcgtgctgattgcccagttctgggttggtttcgcccccattggttacggagaaatgacatctcaggagattgcctacaatttcttctccgtctacttggccgctcccgtggttctggtttcttacgtcggttacaagatctattacaggtgcaagtttgtgaaatccttagaggtggatttggacaccggtcgtcgcgatcttgatgtccagcatttggttgagcaggaattggccgagcaaaaagaatggcccaagtggaagaaggtttacaagttcttctgttaagcggatgttttatcttttttttctttcgacatccccccttatgtactacatctttacgataccataattgcgctatgaatatcatacgaaacgttcatacattccaaagggcataccctatttttaacaatttccaagacactactccgtactccatagcacgtactataatctcgagcctccaggcttggcatatctgtggggaagcgtttagactcagtagtcaagtcaggcatctgggcataacaaggctgacaacataggggtagggtagttatacatagtactattgcactccagggctatacatctgtattttctaatacattttgattgaatgtatagttattattagcctacccggctcacagccacaatgcaaagtcaatgcgcaattcaattgtaaacaaaaaatagacaagacactcctccccctcccccttttttttctctcagcatgaaaaaaacagccaaatttaaagatttgcagcaaattaccaccccggcgtaattttcaacccaaaaatagcccaaagtggatgcaaagacggtggggagaggtcgggttgtcagccaaaaggacgcttgttaggcggtaatggtctgagatgtacgcaaatccccgtaatattacgagccacatgtgacgccctacgatctggaaatccatgaactccatcaaactccatctctatctccatcttcatcgttcccattcggtctttctttgtttttgttgccagcttcctgacgacttgcatcgcaattcgcttggcctggctttcgctcattttagcttcgaattcatccgcgatatcggcgcctaacaccctgcgcactctattctcacgcattccaaagcgatcgtctctgcttcgtcattggtgtttcggtctatgcgcagctccgtcccgtgtcaagactggacattgaattcaaaaccaagtcaactggtcctccctcggtgaccttgatcatatcgcaaactcagagcctcatcgactccgattgactctccgtttcgcgcttactccgcccttttacgattcgcgttttcctccgaacatacgaactcatcgctgtcagctgccgggtcgctttcccttcttacgccgatcataacgtgtctccgcctgacggtctgaatcagccttttagccgtccgtcataatgcctggtttcgcggactctttctggacccccgactatgcttcgggcttgggggtgctatacgggaagctgcagcagggagttgtggaaaacaaacaaattttggccattgcatccatgcgttcagatgcagaagagcagtatggactccgcatgggagacattgccccgagcgtggataagatgacggcgctgggattcggcaaggacgatggtgccagtgtcagaaaggtttgtttcagacgcatagagaccggagtgaagaaagactgacgtcgcgcgatcctcgttacaggcatacgaaggaatccgtaccgaaatggtcgaggcctccaagaaccaccagaagatcgccaacaatatccgcgaattggtcgtgtcgcccttccggcgttggagcgaccaacacgaaatgcgtgttcagtattcgcatgacgcgctccagggccgcatcaaggaacacaccaagcaggccgaactggtaaggaaactgcgcagcacttacttcaacaagtgtcgtgtggttgaggacctggaagaagagaacaaacttgctttccaagatcccgagacgagtcccaagatcaaggtgcccccgaagatcgttctccctgccgaggaagagcccgacgaagaccccatcgagttgggtgagcggatattcccaccagaccacatcaaaaaacttctcacccatatgcttgataacatcaagcttggcgaggcgaaggttcccattatcggcacttatcagaatgtatccacgggcgcggatattgcgcaatatattcaaacctacatggaggctgagaatctcactcaagtggagataattggtcaggatatggtagacaacggtcttctccgcttggttggaaatatgggcaatgtctttgccaatagctccaagatgaactaccagtggcgccccaaggttttccaactcaccggtatcccagaaaaaaagaagcctctcatgcgtgtcacctcagtggcgtcaagcgaggacggcaacggcagcgactcacctattgcatctgtctccgagatgctgtctggctggaatcccctcaacaacccttacccgaacgagacaccttcggagaagctccgaagggaggctttggaagctgatgaacggtacaaggttgccgttcgtaagcttgaccagatccgctgccggctggaggaagaagtcattggccagctcaaatacatggaacagtgcgagctagaccgtctcaaggccatcaaagccgtggttcttgacttctcgggtgcgatcagcaatgtcattcccaacctgcagagcacagtggatcatatgatgctataccaggaaacaatccagcccctaggcgacttgagatacctgctagagaactaccgcacaggtggattcgtacctaagatccaagcatacgagaactactatggttccgttgaaggtatagccttggtcattgcccagagatgaaaagttactaattttaacaccaccagaacaaaactttggtgtcgaccttgaagctagagcccgtgctgaccgcaaacgtgttccaatcctggtgaccaccattctgacctatctcgataaccgtaaggaattcatgacatacattcagattctggaccacgctcacaaatcttgcaggctaccctgaacttgaaggcgatgaagcacgacgaatgatctggttgaccgaagttgatttgggcacgacgcacaagcttcgtcaaattttgaacaacagcaaagccgattatgccgaggtgttgcctcaattcggaattccagttattgcaagcgttctaagattgtaccttcttgaattgccaggttcgttgctctcttggtggcttgatatatccttatgctaatccccggatagactcattggtttcctcgcaagtttacgagatcgtgaaaacgatttattcgaccactgctcatgagaccacggaagaagggcggatcaaggttctccaaagtacccttgggcaactccgccttgtcaatatcgctacgcttgatgccattatgactcatttcacgcgcctgattgatttgacctcggccgacgaagaatacatcactttgttggcacaggccttttctccttgcattctccgccctcgcatagagagcagtctcactatgaacgagcgccacagctaccgtctgatccgtgatctgtttgctcacaaggactccatatttggcgaactgaaacgccaatcgagtgcgctcggaatgaccagttcctcctccaaccgtccacgggccatcagcacggacgagagtaatcgtcgtgcggcgacggaggcccgccagcgagctattgtcaaccgcagccgggcaaccagtcctgtcaatcgccaacggcatcgacgtgaccgctcgagtggtgcttccgagataggtcggttcccgatcaacgtcagtagcccttcagatcgcagatctacccgcggcagtcttgatgtaccgcccaacaaggctctccaggccgaacctgaggatgctcctaccgtgaacacccaagttgccgagactattaccaacggcacctataccgagtctccttcttcagctgttgccagcagcagcacccactcgagctccccaagccctcctcctgttcctttcgaggacgcagcctccgatgactccccaactcctactcctactccggctgcaacatccgccgagtttgagaagcgcaattcgatgtcccgctcttctgtcgctcgatccagccgcaagccaggccttggtagcttgtccagcttccccactggctcggctgtcggggccagggggnnnnnnnnnnnnnnnnnnnnnnnnnnnnnnnnnnnnnnnnnnnnnnnnnnnnnnnnnnnnnnnnnnnnnnnnnnnnnnnnnnnnnnnnnnnnnnnnnnnnnnnnnnnnnnnnnncggggcgcggctgtcggggccagtggcacagagagcaatcgaagcagcattgccgaaagtgaacccaaccgagtcactctggaggacaagcctatggacgactagttctgaggatctgtggatgcggaggaaaccttgtacagatcagactgggagcagtatatcgtgctgggaggaaacatgcgttattgcatcacattccacccacatctttgttgctccctgatcatggcggagacgacttggcgagtgacaatttggaacgttacctttatcttttcttgtcttttgtttctccttttgaacttgaacttttactgcatgcctcttaagcatgcatgcatacataccctgtcccttctgctatgttaccgcagaagggattgttcatctcccttttaccttgcctatgttactgctgctgtgtttttgccccttatgtttcctgatgcattcccttttttgccctcgtggtgttatccacttggtgtatgtatacctcctttttcgtgcatatgaatttctttctgtcctatatatagtactactctaacggtgtagttctgtagaatttacatggaattcaatagctaaaaagcgttttcatcttctaatctctttatgcctgaaattactgtctccactaaagtctggtctggattcggggcaagaaccaccgagctttagctctcattgacttggattttaacattctcccgaaatattactttagtctatgaacgtcttgaaaacaaccccagaatcagacagcaaaagtactttgtacgaataaccagccccgcatatcttccaagcatctacaacttgacttccacgataggatattccaagccaagcgcaacaagagaaagaacacaaaacaaaacaccgaaacacaaaacaaccccaagccatgctaccaaatagccaaatcccaatcgtggactcccacatccacctcttcccagaaacgcacctaaagaccctatcctggcacaataccaacaacccactcggcacacaacacagcgtaaacgaatatcgacacgcagtaacacaagccaacgccacacccgccctccgaggcttcatattcctagaaacagaccgactatcctccatcaccgactcaaccaagccacccaacaacggctggcaacacgccctggatgaagtctccctcctaacccgcatagccctcggcacaccaatcccaggcgagggccacgtcccgcacgacaaaacgctctgtctggggattgtgccgtgggcgcctgtgcccggcggaccggatgtgctgagcgcgtacatggagcaggtccgccgccgcactggggaggaggtttgggggaaggttaggggagttcggtatttggtgcaggataaggctgaggggatgatgctggagaacgggtttgttgctgggttgaggtggttggggagggaagggtttgtttttgatcttggggttgatgctaggtctggtgggttgggacagttgagggaggcggttgagatgatggggttggtttatggggggttggaggggggggatggggnnnnnnnnnnnnnnnnnnnnnnnnnnnnnnnnnnnnnnnnnnnnnnnnnnnnnnnnnnnnnnnnnnnnnnnnnnnnnnnnnnnnnnnnnnnnnnnnnnnnnnnnnnnnnnnnnnnnnnnnnnnnnnnnnnnnnnnnnnnnnnnnnnnnnnnnnnnnnnnnnnnnnnnnnnnnnnnnnnnnnnnnnnnnnnnnnnnnnnnnnnnnnnnnnnnnnnnnnnnnnnnttggggggtgggaggggggtgatggggttacgattgttattagtaggtttctttttctcggttgggattcttcttgctgactgctatagaccatttgtgcaagcctaaccttcgtttggagtcggatgatattcgctctcatccggagttccttgagtggaaggatcttgtgactgagatggcgagggcgagttctaggacttatatgaagctttctggggctttttcggagcttctaccgctacaggcggagtcagaaccggatttcgaggcaattgttgaacgtgtgcagccgtggacggatgttatttttgacgctttcggggccgatcgtgttatgtttggatcggattggccggtgtgcaatattggcggtggtgggaatgatgtctcttggggtcgatggagacgtgtggtggaaaaggtcttggaacggcgaggattatcgggggaacaaaagagaggtgtatggggatctgttgctttgcatgcctatggtatagagatctaggtataaaatatgaaatgcaaagccatttgctcggacttccaagaaaaataaacaactatatatatcctcattgcaggttaacaaataacccaccatcaaccagtagctgcgcaccagtcacatagccactcaattcctcacaagccaagaaaacagcgggcccagccaaatcccgtggttgacccagtctgcccagcggaattcgaccttccatataactccgcttaacagggtccttcatatcctcctcattaagctgcgtccggatagtccccggcagcagcgcattacaccgaatgccgtacttaccgagcgcacacgcacatgactgcataagactcaacacgccggccttggtgggggtgtaatgtgtctgctgggcaccgccgaccagagcggagatggagctcacgccgatgatggacccgcccgatggtgactgggccagtgccatttggcgggctgcagcttgggtggcgtagaatgcgccagagaggttcgtggagagtgtgtggttcaagagggaaggttcgagtctagcggggtcgttagagaggagaagaagagtgaattgtaaatcgataaatctcactctaggaattcagcgaaccgacacacgcctgcattgctcacgaatacatctagccgaccgaatgcctcgacggtttttgcgacaaagttctggcctgtctctggctgcgaaatgtcgccggataccgtgaggaagcgggtcttggctgcttcggcttcgatctcgttcacgtctttgcgtagtgcttctagcagcgcgtcttcttttgcgccgccgaggtggctgatggagactttggctccgtgacggatgtaatcaagagcgattgcctgtaattgagttagtgtgtttttcttgttttcctgaatccaaatgagaaatcatacccgtccgatgcctgtgaggccaccagtgatggcggcgactttgccaactagtaattgtgggaaagtcattgaagatgttgagaatggacattgatcattcacaactctcccaattctcccattctcacttgggccgaatacgtgatttctcgagctcgggatttcgtggtgatgttaccccgagtgtggggaaaccccgcagtgtatccggctacgaagtacatttcctctttccagtagaataatgactagctagcaagtgtcgaaagcattatcgacccttggcccttggaagcttccttgttacgatttatacaggaagatttggagttttgacatgaaacgaaagagttcaactcggctcgttctcgcttgtgtatcgcaacgcgaaaaacacagaaaatcctgtacaatataatgataataagtataggaagggacatgagatgggatttcaaggatcctaaactccgatgtgtatgtacatggctctcgtatagtgtgtaagtaacttataaacatgaaatatatcacaaagaaaagaagcgaagaaacccctcaaaccatcaatattacgtagagccattggccaactcctcgttgtcgggtgcgcgtagggacttctgaggcgctggcgtaaggatagcggcagcagggatcaggggagcagcaggattgagctccagaccaaacccgggcttgtccaagatcgagacgtcaagatatcccttagtaggaatgggctcgttcaagaaaaggttaccaaacacaggctcgacagtgtggccatcggcagagttggcaaggtactcctggaaggggctattggactgggagacgacaaagtggtacgagtagggaccagatgcgtggggcacaacaggaagatcgtaagcagcagccatggcagcgaccttcagcagctcggtcattccaccaacccacatcacatcgggctggaggatgtcaacgttgcggccctcaatcagcttgcggaagccgtagcgggagtactcgtgctcgccggtggtaaacttgacagtggggtgggcacgcttgagaagcgcgtggccgtcgaagtcatcgggtgaaagacactcctcccaccagtcaatatcgagtccaatagcctcgcagcgcttgactagctggattgtgtaggggacgttcaaggacatgtagcagtccacgcggagtgggaagtcggcaccaactttctcgcgctgctgacgcaggtattcaacgttcttcaaaaggccctcagtaccctcgtcaggaccgtgtggcaatgccaccttggcgccgatgaacccggcagcctttgcggagccaggttggggaccggtgcagtaaaagtccagtcgggttcgagtagcacccccaatcagcttgtagacgggctctttgcggatcttgccctgcaaatcccacagagccaggtcaatgaccgagatcacggcgacgggcagacccttgcggccgtagaacatcgaggcgcggtacatcttctcaaagaggtcgttggtgtcgcgggggtctattagaaatatagttcgtcagaaagatccattgttatatgtatgtgagatggtgtacatacccgcgccaaccaggaagcggttaaaatgttgctgggtcagccagcatgcaggcgggcctccgaaaccagttgcaaagcccttggttccatcagtggcctcaatctccacacagaaagatcctaaaacattgattccccatgatgttcgcgaaccacggaattgtgcccacttgctcataggggtagcgatattgctgtcgaccagccagtggcctcccttgacctgtattgatagttagaatgttaaatttcaaaacaattgacatctcagagctcgtacattgtggtaatcaccgccagagccaacaccatcaatgatgaaggtgcggacttccttaatgcggggaaattccgttgttgaacccatgacgtatgaaatgaacaagtctaacgaaagaacccaataattgtttagacgaaaagataaagaaagaaaagcagagatccaacaattgcgggggggttcacgtctatttcaacgaattccagaagccgaggccagctcggggcattgctaacccgagagacggacaaacggcgactcggacaattttgtgacaacacatgtttggttgatttatgtcaggctatgtggagtggataaaaatgctcttgaggtcctacttcttgaagttcccgtctaaccattgtgtcaacgacagaaaacagcttgatctccgagccttgcgtccttcaaagcccgtatggctcttcaaaatcattgtaagaatctggagatctagaaatatgtcgctgcggccgctattggtaggtagttgacctgagtgccataggcctcacgggatgatctaaatcattcaagggcgtagttttaagacgtcgttgtaacagactgtaggtccttaagcagtctactcggagctggcggatttctaaagtagtatgctgacaatattggtagtaagtgtcatgaagagatagtagctgtcgatattcaattggatgaaattcgcttgatatgtacgtagcgagggtataggattcggagccacttttatgttgtatgtctgtataatgcccggttaagctaatgaataagatcgaaggcaaaagtaccaacgcccatttagatacagagctcacgggttgttttaagcaatagctatatggtaaactagtgactatggtagtaagacttgcaactctccttgactagggatttcggttgaactctttacgcactccccttttccagtataaaaaatgggaagatacggttacaaataagatcagctattatttactagatcctattcaaatatcaaagagatataagtcgaagactcgagccaagaggacaccaaaagcggagaatgcggggtgccccggtttctgcctgaggccttggctccacgagccgaccatttcggtttctttccctttccctcgggttggatgctaactatcgtggagaacattgcaaggctcccttgattttaaaatataccaagatattcgagtctattccagtctattcggacagcttgccgtgaatcggtcttgcatcatgctcggtccctgatagggcgaattgttatctcgctaaatcaaaatgccgaacactgcgtttcccgcacaggagacactgtcctccaatcagcaactcggtgacccatcccgagatcagagtgcagagtattcttcggattctgataatgatcatgttgaactcaatggctctacaagagccttgaagcgaaaacgccccctcactgtctcgtgcgtacctggcggctcgttcgtatggaacgtaaccccgactaaccctacctagatgtgaactgtgcaagcagcgaaaggttaaatgcggtatggtgtaaaaacatcctaaacggatattttgtttctaacatcgacaaacctagaccgagtacaaccgagctgtggctggtgtacccgaaatggccagctatgtgaatatagggaacgaaagaagccggggctgagagctggctatggaaaggagttagagcaacggcttggtaagttgctgtacagtctgctcgtcatctgtctcatgtctcactcgtacctcagatcgattggaaggtattatccaatcgcaagctcggcttatcgagatgcatattctgcaaagccagccttcaatgggtcacgaattagcccatgcagggcatctctcatatagcccttcatccgaaccgtcggcagtccacggacccagtcctagtactgctctttacttcaacgaccctgggtctgctgctactatactctcacgccgtgcggatgtctctatcaatagtccatcggatggctctgtgaggaatacctcacataataatctgcaacacgacttgtcaacggcaccagttggccagttggtacataacgaaaacgcacatcacgattattcaggaaacgaatcgtccctgaaggtccccgtcaatgtatactcaaatcaagagcaatctcttactgatcctgatctagatctgccaccatatgatttgctctatgctttggtagatctctatttcgaacatatcaattcctggtgcccaatcctccaccgacgaacaactctggataccttttttggcccatcgccactagaggaggcagaccgaatggtgctgtatgcaattgtggcaacaactctgcgtttttcctctgataacaggctaaatgaccagaacagaaagcgctatcatgactcgtccaaacaaaaggtcgtcctgtatggcctggaaaattcttccgtcagggcacttcaggcactcgtgattctagctcttgatttggttgggtcttctaatggcccaccgggttggaagctccttgccttgatcacccgatctgtagttcacctagggttggcggtggaatcaaagtcttctcttatcaaccccctctatccctcaatctatactctgagagctgtcactctttcggagccagaatcttggattgaagatgagagtagacgtcgtttattctggatggtctacctactagatcgatattccaccctggcgactgcgttcaatttcgccttggatgacagagatatcgaccgcaaacttccttgcaaggacgattattttatgaagaaccagccagttgagacgcggtggttccaatgctccagcgaccgtgtagactatctcagtaaagctgaaaacgttgggtctttcggtctctatatcgaaatcttaggtatcctctcgcggattcacctgtttttgaaacggcccgtcgatatcggagctctgtcggatgtcgcggaatggcaggctacctatcgcaaactcgacagtgacctcacatcgtgggagttcaatctcccagcggaatatgcttacgaaagttcgtcccgactcttcagtgggcccaagaatggccgggctctgcataacgattgggtgcaattacatgcaacctaccaaacgtgagtgggtcacatctttatcgttttgttctaataaattaatgaagcaattaatctagagccgtgattcgtctgcactcctcagcagcatacccgacaacccgatctccaatcttcacgccctcatatagtgccagccagcgatgccttctagccgtcgaaaacattctatcggtgacaagattcgttgtagagcacaacatgctagacaagatgggcccgcctttcgccttcactctctgggtctcagcacgcctactcctcgtccacggctcaaccattgcgcataccgtcagccccgacatcatgtttttcgtggataccctatttcagctaggaagatactggagagtcgccgagcgatacagcagcatccttcagcgcgtcctggacgagtacaacgagtatcagcaatccatcgccatagacggagaacgatccacaccatcaacagtcaagattctcgccgatatgcgtcgctgtgcattcgacctggactttttgatctcgcggcagccacgtgaatcacccgccgacaatggcatcggtgagagccaccagcccgggccaccactcctgacaatgcccgcacgaaacttcgcccccaacgaactcgagtacctcgacgtttttggtttctttaatgttcctcgtgttcctcctgcacgacctcctgacttatctacttctgcctcttctcatttggaaatcccagggtctgtaccaaatccgatgtcgattcatgggttgacagacgctggccccgcacctccgactgggtcagtagatgatgctggccatcactctaatgtgaacgaattcaacatcaccaactacttgattccgacgccggagacagattggctgtttcggccatcctagaggtagtgcgccattttcagtcgcttcttgcctagaggaccgaccaaaatcttcctccacatttttccactctttgctcttaagcactatgttgtatactacccaggttatactaggaatacccttaccaatatgccttccatgtgatcacagacccatttaaagtggcccacttaaaataaccttattctaaagagactttagcacaaccttggaacacactacggtgtccgcgggtagttatacaagccaaagcgagaaccgaaagcaaagatgatagttccattagaagtgttaactcctacaaataacataacatacatgaaagaagaagagaccaagacctcaagaaacaaagaaaggcaatgggatgagtgaaagcatgcaaagtccagggcctacaaacttcatcgagaacactcatttttactcaaacaaatttcaaacgtgtctatgacacgtcggtacgggcttgcatccgggcgaggacctcttcgaggaacacgtcgagaacagtatcaacaccaccgcccatgtcaacaggtctttccatatcccagtgttggaggctgttgaaagctcgggcaatgtcttcggccaccttttccagaccatggtggattcggacactgcggtcgaagtccttctcttcttctggggtagccgggggttcgttaggattgcgtccgggttcgagacggacgagattgttgcgacgccgatccatggctgcgcggagggccggaagaatcacagttccacaggcggtcggtcgctcggtctcagggggaggtcgggtggaacgcttgtggtcgctagaggtaggagtgggaggggtggagcgatggggcatagcacggtcatccatgtttgctggtgcgcgcttcgacttgagtccggaaactggttttgcgtgttgcagtggctctgtatgtcttggaagagcgacttgagggatacgtggagactgtggctggtgtcccacagaatcagcaacagcgcgagaaagtggagctggcgtgtgcaaaatttgaccagatgcgatgcgattttggtcgtgggggggaattctggagaattgcttaacaggagtgccctggttactgaccgcggagctaggtttggctgaagaagcagtatccaatttgccggcggagtgagtagctgcctgtgcgtattgttcgtttaatcctctcgtgggaagattgtctactgcaggtttgctggccactggagacacgaccttgcgtggaggaagtgcggtctgtgaggagcgttgcttgagaggggaagatggagcagagggaggaagtggggttttggtgggagaaacattgaaagcagggtttgctggggacacttgagcgtgtgattggggttgggatgttccggcttgtcggggtgtctcttcgcacagatcccactcttctgtctcagttcgcgtattggtgccagagcgcgacgggggtgcagatgtttttcccacaggacgaacggtcccaaaatcccaaaggtcttccttttcttgggttctggcttttgcggtttggtcggcttctctatcatcatactcatcatattcgtcctcgtcgtcttgaccccgatgagttatttgccaacgttctgcccgctcaatgagttccgtcaggtaggttgttcttttggcgcgcttcacaaacggatgctcaagaagctccttggccgatggtcgctccttagggtctcggcgcaagcacaattcaacaaattgcttgaacggcttactaaaatcgcctaccaatgtggggggcgggttcttgggaatcaagaacagcactttcatcgggtgaatgtcggcgtacggaggatcaccgcaggccagttcaattgccgtgatacccagggaccaaatatcggccttgtaatcgtatccagattgcttgatgacttcgggagccatccaaaatggtgtacctacaaaggtattcttcttagtcattgttgccgacagttgtcccgacacgccaaagtccgccaatttaacttgaccactcgcgctgagaagaacgttggcagctgcaatcagaagtgttagtcgtcgcacgtcgccatttcgagcaattgaggtcttcgtacctttgatatctcggtgtagcttctggtcactgtggagatagtccagcccgcgcagaagctccctcagaataatggcaatgtactcctcgtggataacaccaggtcgcagtagaccgtggcaactaccaccagcgcagaactccatgatgatccacaggttagaccctttcaagtatgagccgtgatacttggtgacatatggtgacttcagctcggacaagatggcaatctccttgatgatatcgtcgacatcatcctcggcattttcaacgtcaatgatcttgatagcgactgattctccagtgcgtctatccaaactaattgtccgaattgggtcagctgtttgttgaaccaatatgtggatatagaaggccgacttaccctttgaacaccttaccgaagcttccaccgcctgtaaaatcacgaggctgttagcaaacatatgaatccaacgacccttgaaggctcaagaattgaaaaacgtaccgatgcaagcttgcttggtgtaaatggtttccggatcaattggaggcggcattttggcgatttatcccagtcaccggaggatgacgatggacatgaattatgcttgaagctatcgaggctaatgatggaatgtcagattcacaaccggcagtcgcctatcacaaggatggagtgtggggttgagccgtacgtgacggtgcttgaaaatggactcggatggctgtctggggtgaaagaatgtcgctatccgatcaatctgaatcgattagataagatctatgcaatatctttccaggtcgcaagattctaggactgcacgggagagaaggaagagaagagaagacgttgttcgtttgggtgctaacaattgataagatgtcaactggtaaacaaagacaatttttcaataggagcaggtgcggcgaggggggtgatcgtaagattccaaaccgtttgtggcatagtcttcacgttgcgattagctcgtctcactccccgggcttctcagggatatctatgtcgtgagctgcccttgcttgtttatcgacgcggggggcttattttgccgctgcttatctgggggcggtgtatctatggcgttccaagtccagttacaacatttgaatattgtgcaatcatctgagacttgggtttcaggcttggagggcatcaaattattaatcggactcgattttgagacttgcgatgaaaacccacctatgtgttcacttttccccagaagttccaccattccaacttctaattcatccccacaaacgggaattcggatgggggcatatcgggacccgaatatctagtataagagtgaattgcataaattagaggtgctttacagacacaaaggcgaactatgtgaagctagctatgttctggggttgtatagctcagaggtttctatgttatacaacgtatgaatatagtatgatggattatatagatcgaaagacttcagcatgtaagaatcctcgtctttcatcccaatatcatctggtttgaaaggagtgattaaactatgtaaactagggcacaggaagcacccgtgacacaatccaaacagttccttattaggaacatcaaacctgtaggtttgactgcatttctcataggctaggctcattctatgaccgtaactatataaaagtacgtcccatgtcttccaagcgaaatgttccttgatccttaagtctgtcaagttggtactgtgtttattatcatgattcattgaatgctttccaggcaagcttggatactacgtatactctcacatcaaggtctcaaggttggcaacaacttgagagcccggtagattgaatgatatcccgaggaattacaaaaccaagcttgaaaacaaaggtgagatcccacgggatccaattcatttccatcaacgccgtgcataaaccaggatgataaaaccgaaagttcaagaaagcaagaggattactcttccagatatccaatcattaccgtgccattcttcaggcccgcatctgcaatgctcgtggtaagttgatcgatgagattgtgccccatgctattcaggtcaaactcgacaccagccttgtctgccaagggaggatcagccttaagccattcataaattctctgaacgggatccgacaatgaaaagcgccgaatgactctgccagaggggtgtcgaaactgaatgcgtgtagttgtggccgggtccgcagcaggttcagtgtgtggttggtcgctgggaatggacgcgaatggggaggcctccgcagctgggtctggttcatccatggtgacatcttcgtcgctggtagcccggcccttgcccttaacagtgtctgtactgcgtgtcaaatcatcagggtcttcgagtgtttgaccagcttctgctgcacccccaagactgttcctcattgccatttccatcatctcctcctcggtcatagcatcaatgctcttgtctttcttgtcggatttgcgcttagcgacaggattgcgcacattgtgattcaagctgtagcgatcgaggaattcgtgaagttgcatgagaaagtccgcaggcttgaccaaaggcggtccagaccagactttcatttgttcaccagttcgagggtcgacaatagcaatgtgggggtaattgtcggagacgtcgcttccctggaagtaatattggaggtaggaagacgcacgggggtcatctttcgagtactgcaggaaaatgaaatgttccttgacagtatcttgcactccagagtccttccacaaatcgcgattcagaacctgacagtcaaagacggatgcgtcctggatattgacaagcagccatttctcggtgtccttcccctcctcgcgcgccacatcccaaggcagtcgggacatgatctcaaagggagggcggtacatttcggcgagcatattggatttggacgatacctccgatgcgcccccagttacggcagcgagttgttcgcgacgagattcatcatcgcccgtccatatggaagatgactcttgctggttgaagattccggcccgacctaaaataaagtgttagtataagttattggaaaatttgaaaacacagatagcacccacctgatcttccacgagctcgtagttggctgagaatattggcgtgcatgtcttcgccactgtcataatccgccccgggccccaccaaagtctctgttgtccgcgccaacggcgctctcacctcatcgtcattatctaggccacctgggccaccatacatttgctcttgtaggcgtcgagccatagcctcatcgtcatcgagtgttggcagaccggattgttggggagtctcatcatcagtgtccgagtcaatattcaccacgtcggcatcatctgggataccagaccgatgagaaggttgagcaggttcaccagtcaagggtgcgcctccactttcaaagtaaagctgcatggcctgctcgatttggaactcagttatctgcaggtactgtatagccagctccggcgtggagccggtaatttcagtgaactgagctaccacgtcgttctccatggtaggcagtgtgctgaatgaggttccttgataaagatcttaatttgagagaagaaagtgagaaagaattgacaatggatacccactgaaagcttaggcgtagaatgaaatggggtaaagactcggagggtgatatgtggggagcgagatttggtgcaaaccgctgcaaaccagaagatcactaggtcccacaaaagaggttgtcaggaattaaaaaaaagagagatagaaaagaaatagaacgtccagcttcacgactgaaagaattcggtcatctcgaatctaaacgcacatgagaggataattgacacctgaggtggccagtgacgcggctgactaagtcttggagaaattgcacctgtggctgctacactgggccgtagctctacgcgcgacgcgtccagcgcgttgaccaggtggtggagctgccaattacacttcctaactgggctctgggaccttctttcctgacattcctcttttagctcccacggaaactacgtctattgttcctaccccgtcgtttttatagtccaagtcatggcaggaacagttctaggaaagcgcactcgtggtgtcgcggacccaggtaagatcgaccatcccaccttcctctgctccttatcttcaagccctaacccgtcttctagcattgccggtgcgaaccgccagcaagcgccgaacagttgttcctcgagctcaccaacaagataccgttccaacctcattacgacgaacaaggtcaactgtaaagaaagctgtcgaacaacctgaccaagaaaatggcgagagcaagacagcgtcggagaatgtttcttctaaacataccttgcgcgatgaccagttcaaatctccggtcaagatcaattcgcatttcaccgtctcgaaaccggtggaaggtaagttcgaaatttttgggtgttgcgcctgaggcaccgctgatcggacatgcagaagaaattacgaaacctatcgagttcgagttcaagacaccttcgaaatcgcgattccgagatgatttaccgcagtctcccgtcacccctagacatcgagtacaggtcggagcaaaggcagtaacaccgcgcaccccccgccatgccgatctccccccgacccctaggcagagtgccactccaaaaattgtgaactcggtgtattcgcaagctaggcaattgttcgcccgaggctctaactcgggtcgcttagtgggacgtgatgcggagcgggaaaagttgatatcttttatcacagaaggagtgaactctcggaaaggagggtgtctctatattagcggtccgccaggaaccggaaagagtgccatggtccaggaagtgtgtggagatctcgatctttctaaagtcaaagtctcgcatgtgaattgcgcaagcatgcgaatctctcgcgatgtctacagtagactcatccaggatttctgcgaggactcggatatgttcaagaagagcgaaggcgatcgcctcaaatctacgttcattccatccaagaaagggcaagatatgttcctggtcactttggacgaaattgaccatctgctcaatggtgattcaggggttttgcagtcgcttttcgagtggtcattgcaaagcaagtccaagctgatgctgatcggcatcgctaacgcccttgatttgaccgaccgatctctcccacagttaaaggcaaagaacctgaagccccgtttgctgccgttcttgccgtacagtgctgcatctatcgcaaacgtcatgaccaatcgtcttcgctcattactccctgctggggcagagtctgacccaaagcttgtcccctttgttcaaccagccgccatccaactttgctccaagaaagtagcctcacagacaggggatctccgcaaggcctttgagttgatcaagcgagcaatcgacgtcattgaacaggaaacattacaaaagttggacaagcaagctaaggagtccgagaatgtttcgatactaggagagaacaccaatttgtcatctcctgccaaagttggcggtgctccgaagccaacttccatgtcaagctacacagtcatcacggcaccccgagccagcatcgcccacattgcccgaatcacatccgcagctttcggtcaaggcactgttcagagactgcaaagtttaaacctgcaacaaaaagccgctatctgctctctgattgcgcttgaacgcaaacgccgccagttcgaggttccgagcacgccgtccaagtcgcgtacatcggcacccactatcaagcaagcatttgatacatattgtgcgctgtgccgcaatgacaacattttacaccccttgactgccaccgagttcaaagacgttctcagcaacttggaaacaatgggcttggttggagaataccagggtcgcggtcgaggtggaactgttgcaggtggcacggatctgcgtcgcacaccctcaaaatctggccatgctccttcgactcctcataaggcccttgacgagcaagctcttgtctgctttgtttcccagcaggaaatcgagagccagatcgttggacctggcgaaggaatccttcggcgtcttctacgcggcgagggactatgattcccttccctatttcttaagcgcatccatacagcatggcgaactttcatttttcatttcccattccctataactgcatagtcggggtcccatgcgagggcatttttatcatgtataacatgcttggagtttcattttggagttggaaatatccttgtctcatcatctttagcgtctttcaatcacggctttccttgttgtcaactctcctttgtctttgctcttgttcaaagtgaatcatgagatctctacacaaaaccagataaaaacacaaatgacttgatcaatggaattgaaactaaagagttttcgtagccctaatcgatattgtctcacggatcgacatgagtaagtcccaggttagtcggccactaggcatgtgatgctggttggttgggcatgactttttgccagactccacgagtcatattattgtcttatataccatctctatcgagctaagtagaagatattttgttctaatcgaaaccatatgagggctttcatgtaaaaagcccatgcatgtaattttatatagcacctgtataagatttatatttctaggaaataagaacaaaagaaatgaatccctgtcctctctagtatattctagagacaatctgatggtgtgtgtcattcatcatgcagacaaacaacgaatcaaacaataaaaagtacgccacctcgcatgaagacattacgtatataaactattcagcttggtttttgttctttctgttctcacaagatatcctgctatcagagacatcgggccctttgcgaataaccttcagcctacttaccaaatcatggcggaaatccaagcacaggtagaagcctctgctctcctgcctgatagccagcccaacgaccctcagccgaccaaggaccccgcagaagactgtaccgagaacggcagatctgttgtaccctacttgttagaaaatagtccagagttccgagaactcagtgatttgagacagaaggctagtcacaccgaactctgatattatacgtatatgattctcatacgttgttaacagggatgggaatcctccgaaggcgatcagtactttgcgaaacttcgtcgaaatgccgataaatccgacaaaaaatcggctacctacttttataagtttatgagagtaatcggacgcgaaattgacaaggccaccaatgccttcaaagcccaacgggttgattcaacctcacctgccattctcgacatgtgcatggcccccggtgcattcctcgaagttgccttgaaaaagaacccgggctcacacgctctggctttcagcttgcctgtctccagtggaggctataaaagtgtcctggcaagcgacttggatgccaagcgggtatttctcgatgtgacaatgcttgctgcggatatggatatggatctgatccccgagggccatgaagatgagaaatttttgccccggcaacttgaggaagggatgcttttcgatttggtcatatgtgatggtcaggtcttgaggcaacatctacggcccccttttcgagaaacccgagaagcaacgagactgatcatcacgcaacttgctctgggtctccagcaccttagacttggtggtactatgatcgtccttcttcacagacttgaggcttggaacaccgtcaatctcatttggatgttcagaaagatctcgtgggttcggcttttcaagccaaagagcggtcacgccaaaagatcctctttttacatggtcgcaaccaacgttgacagccagaacccggaggccgttgaagcggtcaagcggtggaagagaatatggcggattgcaacgtttggctcggatgaagagtacggcaaggtgaacttgtacgaagacacatcggtagaaaccttgctcaaggactttgggccggaacttgtgaagttgggaaagacaatttggaagacacaggcaaatgcgttggctaaagcaccattcatggggaagcagaaaccagagtgatcaatagaaggagaagggtgaccgagatgttattgatatcactcatcacaacgattgacttgaattgattgtttctactagcccactagctctcagtgtaaagacagactatgtagctctagacttgaatcaaacaagaagatcatgaaatccagataggtaactagacgaacctaatcctaccctcaagcaagatagagcatttgaatatcagagcgtcacaaatcccacgctgccaggaggattttgttacattttgatccacgggtgtcttgtgcttaagcaatcctgtgcacctggacaggcgatgtcgactcacaggttgatatggcaggagcatatgccttctaaactttcccatctttcttgtcgagcacaagagcttcaccttttgacatcttcacccttcgacctaatcatcaccatgactgcctcgattctgatcctcgttttctgcgtactctttgtgcccggttcaataattgttgcctcatagtaagtcattattagccatcttattacgcttccttcgcggactatgctgagacctcccaaagcatcctaattagcccgcttcaagcaacgacagacacggctcctcccacagtcgtggacaaacattgcagagagcaggtgattctgtatctgcttgagaattctccgtagataatcaacactttcggatggctggggatacggttctacctcgtgtggcgtcttgtcaagttttgcgtggacgatcttgtgaaaccccttgttatgtcacttgccacaactgcctacaggtaacgttatttgattgtctaaatttgatctcgaacctgcaaagctaattaccggcatagagctttcaatcgattttggttccggaatgatggcccccaatgaggaaggaggcaggcgccggctactataacgcccactttgccaaagtctccctagctccaacattcagcagatcaaacgtattatgatgcatcgagttttctgtatctataatggataactgaggaatgcctgtatcttttgacaaggaagaaaggtaggaacctattttgtttctgtgatacagttccccgatattcctgcagacattatgtataaggcttcatgatatgagatctaaattgcctcacgatattatcaagcagcgaagaatatcaatgcaacatttcccccccaaattcctctcacctcactatctccccgtcaattacgacccccatacccccacgccctcttatcgataaaccccactacgtctccggtatataaatccgctgttgagacccctgttatccctaccaaacctatcaaaaatggattattctctacagaatcacgcttcctatatcggccgaccggtctccgaacttcccacccctgctcttgtcctgagtaagtcggtgctggagcggaacacccagatcttgttggatgatgtcaaacgattgggaattgagtttcggcctcatgtcaagaccctcaaggtacagcttctatgcagtattagcttttaggaaatgcactaattgcattggacctgcagtgcatcgaggtcacccgcatgatgcttggcaacggtacgcaccgtcggatcgtcgcatcgacgctagccgagatccggggggcgctgggtcttgtaaaggaaggcatcctagacgaggtgagtaacagtaactatttcaaaaccaaagtgtagcagctaaaccatgacagtgtctctacggtctacccatctcagccagcgccttgcccttcctcgagactataaccaagtctctgaagattattctgatggtcgacagcgagcagcaaatagatctgctagaatcctacgccgccaaatcgtcttctcccgtagcaccatggcccgtcttcattaagatcgacgttggctcccagcgcgcgggaatggtcacagactcaccatccctccccagattaatccagcgcatcgagtcatcgtcggcagcgaccgtttacggcttctactgccacgccggacactcctatgcatgccgcacagaggatgacgccgccgcagtgctccagaccgaagtcgaaggcgtagtggaagccgccaaggtgttggtagacgggaaatccgatagacggatcgtggtgtcggtggggtcaacaccgacagcacacgtggtgaaaagactccagggtgcattgcccgaggggatggagttagagttgcatgctggtatgtgatgcgtgacaactagctaggtgccatactactgcctgaaacagaatgactgacacggacgctaggaaactaccccaccaacgaccttcagcaagtagcgacctcgctcgtggaaccgacacagcaggcggtgcgcattctcgccgatgtctgcagcgtgtatcctgatcgcaacgaggcgctcatcaacgccgggaccatcgcgctctcgaaggagacgagcgagttccccgggtttgcggttgtcgttgatcggccccagtggagtgttgtgcggatggcacaggaacatggcattctggggtgggcggagtcggatcagacacgcaggcttgttgcgaagacggggtcgaagtctggtgatggggagaaggtggaagctgcgtttgcggttggggacaaggttttgttgtatatccagcatgcttgtatcacggctgctatgcattatgcttattatgttgttgatgatgaggatattgttagggagacgtgggttccgtggaaggggtggtgattgtcgtggtttttagagtgtcttttttcgtatatacttgattgagcatcaatagaatcatgtatcattattaatagaaggaaatatatccgtactctgacattttaatctgtactttatatctacaagatctaaaataatacatatcgcccagtttaattagaccacttgatatagtgatagtagagttggtgaatagcatttacattgatcggtacatttactcagattgaattgaacatcggatataccctgatcatgaaatgagcttggtgtgagatgccaggtcgttcgaagaaagagtacattaaacttgatcacgaagaggaagaaagaagaagaaagttgcaaagtgggaagcagcctgttgatatagcaaacctcgaatatctcgcttagctatatagcaaacaatctatgttgcacacatcagatagtcgacgaccagtagagtgatagaacagacaatcatgtaacacttggcaatatctggcacaaatccaataaattcaagcaccccaacgcttcttctgaaagtgatatgttgaaagtgttgaggacattcttgaatagacatggcagaggtagaaatagaacgaatagaagagaagagactgccaagatatatcagaaggaagactactaagtatgccaccgatacttcgtcatcgctcaccgccttcacgaactatgcatgttaacagatgctaaccctatatcaacttccatttatgtcttttgatgtcttttatactggctttttatctggtttttgtactacttgctatgtgggtttcaaatagaagatttattactagttcaacaccagaaatacctaccatgaagcacactactggtagagtattgctaatttaatttattgactttgaatatgatagacaagttgaagcaattttgtctctttacctataaccggatgactataattccgccaggcaatgatacttattcgcccgtggaactacaacacatcgaatatatccagagatataaaaaaggtgagattatgaagaaagatgtaaaggcattatgtacaggagaaaagtgaatgggtatcatgaaacttggctggaacaagacccggaaaatgtgtggcccaactgttgttgcgtggccgattttctttccgtcgctggtatcacgaggcccgtcgttgagatgggaccgaatgtgagaagtgaacaggatcaaatccatgaagacaaagaaagcaataaattatgatagaacgcaaggcgttgtaactgggaaatgttttgagttgatcgtggggatcgttaagtcgtaatgaagaatgataatcaagatagctgattaatcatgttcaaatttttgatattttattggttggaggactcaatcgaggcggactcaatcgagggggcccgagaaggggtgcgggatggaataggcgagggagcaggcgactcgccggtgacaaggtcgtcagtggtgaagcgcggcaaccggtcgtgcgtagagccgtgcgtggactgatcggaagaggcggtggaagagcgagtagaactgttgtccaatcgcaaggactctatgcgctccaggtcggcgtagtcaggaagtggagagccgttgtagtcttcaatgaagctgggggtaccatcgggcttggtgtaacaaggagggctggcgggaacgtcctcgtagattggaggcatttcctcgtcccagctaatgccaagaccaccacgctgtgtgacgtggaggtggaactgcatgcgaagcacgcgcgcggcaccggttggagtgattaggcgggtgttgccattagggcagaactcctcggccacgataagctcgatgacgaggttgtgcttaacttccagaccgccaggggcctccatatcgcagacggcattggcagccgggttgatgttggcatcgaactgcatggtgatctcaccaccagcggtgtcaaagtcggtcttccagccggtcttctcctcgttgtgtccgatgacgcgagtctcctggtgtagaacacctttgccttcaccgccgatcttgtgagcgtgcttggggcacgcagtggagacaatcttctgttgctcctcgatgcgccacatcatctttcgaagacgccagcgggtctgggtcttgtcgcccttgtcgaccacgccgctcaaggtcatctcgacggggaagtgtccgatagggtaaatgacggagggcagcacaatgcggccagtgaggttggttggaggaaagatgcggatagaggacttgtcgggcccgggaagcagagaacgactgatgtccagaggcagcttgaggttgtaatcctctccggtgacgctccgtgcatgtgccagcaggaagtattcgacctggcccagcacgccattgcacgaggcaggaaggtggccggggaatagatagctgaatgggaagtcgtggtccccgccatcaaggtgaaggtcctcggtgatgaaattccactgcgtcaactcttcggtgcgagtagcacagttggagcagtgattcgagacaggcttcttggtggttgtcttggagacgagacgtacatcaaactggctcaagatgactccaccggtcaactcagcgactgcaatgcgcaagcgtcccgagaacaatgcgccggtagagctggcaggtggaccatagcagaccagtggtggcgactcgatcaggacatccagcttcgccgctggcgggtgcgcatcatggctggagcgctccttggaacctcctgcacgtccggaagtgcggcgcttctctttgctgtggtcccggagagggtgaatgaaatgatccattgagaatgatagacggcgttcgggagatcgtgcgcgctctgccttgtgagctgacttctttgtgtgtccggggatctcattgacggagagagtcgaggaggagttggagtgattgggagttgaggtgacggaggagtgtagcgaactggcgttcttaatcaggttggggattagacggcccggcatattggcgactgggttgtagaggctcaattgggagtggggtgatagttgtatgttcgtatgttcaggaagcagtgcggtgagggaataattgagaagcagatgaggcaatccaacacataatagtccctggaagtatgtaggaaaaagatctgcagaagaaagtcaagttgttaagtgcgcgacgtgccgcttttgaatggcaagaacaatcatgtgctaatggactgaacccatggaaaactaaaaatgaaaccccaaaacttgaattttcattctttttccgttctttttttatttttcattgctgtttccactggccaggtaccggggcagtcaatgagaaaaagaaaaaaaaaagaaaaaagccagccggtggggcttggaatagcgtcatagtggggtctgacagtacggatacgtggtaataacacttaaaaatacaccgcattcgtgattttacccctccaaggtcctattttgatgcatttgtttgttattctgagatcatcctgatcaaccaagtcgcaattttgatgcactctccatcacatcatttcatcttatagtttcaggtagcggtctgatgccgagacaaagagcatgaactgtcattgttagacgtttatattcccatggttggaatacaccttaaacccatgtacaatcgacttcataaccatatatctcgcccaaaatctagcatcgcctgactcaacttctaccccacatctcaaatgatagtctcggtatcatgcttcgatcaaagagaaaagaacatcagtaaattccaggctagaccccatcagggcagtcagagggagcacatgatgccacggttggctccagccttagcgtagaacccgtggacaaccgtgcgtaatgactcacgtatctacgatgtaccggttcggctaaaccggtcggatagtgatggcctactcggcttggtatacggagcaccgagtactgatggtatacttcctttagcatgtgggttgcccgggttcaatctataacatacagcctcgaaacttagctatggcgaatgtgaccaatatgaccaataacaggagggaaccttggaggataccccggctttagattatcaatcacttcatagccctcgcgaactactaactatacgacagagatgtgatcaggtgtctatgtccttgactcctagtatgttgtatcttaccttgaaagtgccacgacgacactcctgcaggtatataatgtttcatccctttccaatttctgaaaatactcgcctgtctataaatactctgaaatccagctatactaagccatcacgtggcgtgatggcgtagaatgacagtaatagactgcgcagtggagagtgtccagacctgggtaaatgacgaacaataccatacacagccgttaccataccggtcatgatctcttccagaagatcttcgactagcgctcccctaaataaaatccatattttccgctttgggacaaccaaacgcgatggaaaaggaccctttgcggagctccacccggaaaatttttcgtttcccttttctcctgttgaccgcctgaatgcgacggagggggtgcagtcgtctgatctataaaagtggactatagttaggggcgggcttctctaggcctcggagctacgtattccttcctcgaggtcacgctcgtatcctgtgcgcctctaccccgcactgcaaggattgcattttgcgggggtctgagcaattgcgagatcgaactccctcgacaagagcaacagaagtgaagcaatatcaaaatactgtatctatcaaactgcgatttacaatgatcgtccaaaacgttctagcccttccacttgtcaagatatgctccgtgctcacaaggtcgcccccctgacgaatcactatccccgccgcacacactaattacctaacagcaacaacagcatcaggagttaaccgctcacgtctcacctatgagcatcgggctcgcgcgcagggtgcccaggcactggagctgtagcatgtagcacagacacgttgtgccatatgcatgcagggagcttgaagcattgcagcttgtttggctacgtcgggttagaattcccgactcgtccaccctcgagccatacaacatacaacatacaacatacatatatacggagtacattatagggtccatagatgtttcctcggagcgccagggttctgtagtgagctgacggaattgatcacgccatggcatttgttgtctttgaaccgggctcggagacgcggatgcggtgatgccatgccggttcttccttgcagttcctcttccttgtacttccgggcacgtcagcccttgatgcattgcagtcggtgatttgcattgtcaagctggatcaacctaaataggcattatgataatatattacgcaacgtggtcctgatctgagtaatactacggagtactccgtactccgtcagtatttagggtagtaatatactagtgattccaacgcattatataaagtagctccactgtctcctttccctaggatcattacggttaatatgcttgattcacggctcggaaatcacgatcgcaaatcagtggctgtcgtccgccggtcggatggactagccaataattgctgctaaatgggacatcggcttctcaggcgagctgcctctttcggggcgatctcggattgccccgatctgtttccgccggcgtatgatccgcctttttggggctttgtttttttcgacatttaattgccggatttgcactccttcgattgtcgggaaagagtaggtactaggtacaaagcacatcgtggagaaaacgtgctccgcacattgaaccatagatcatatgggaataacgccatctcgtcataatcccaagtggatataagtacgtacctaagcagaggcgatgtgactacgggcatcgtactgtaaagccttacaaattacctcgattttctgcattttataagcgctcgacaatagctggactccgcataaatcgcgccattttaaaaaccgcaaactagagctgaaacgaactggaatgagaaaaatagttccacggacaatggccggggctccgctcaagcgcgggaaagcagaaaatttctgttcggtcatccactcagaactttatactcggcccgttgcaacgtgatctttagcctcacctctgcgcggcccgctatggtaactgtcatccctggttcagagtcccccctgggtgtttctcctggcttaattggagcatgtatagtgcgctgtacagtcgctccaccgtcgatggggcggaaaccgtactttcaactttttctaggttatgtgttggaggctagttggtcgtctcttggggtaacaattagctaacctgtagcttggcagtgagacgttgttatgagacccggcccgttagccggtctgatagtgcagtggcttcgatttggctggcggtgtggatttcatgtgttggtattgggctaggctcgtctatcagaataaagaaatatatacggttttatagtcgctggtcaaagcgatgtaacgaggagcataccaaaaagaaagtagcttcagtgttcaatccttgctcgtctcagccttttgtggcttgaatagactctaaataataccttttatatacatatcgattcttatcagatcttgcctgaaggagaccatgggttcaaggggtgtaagatatttcaattgtctgaacgtcttctctgccatctattcgcaggcgttgcattattgatctatggaaagtgaatcaatatcaagagcaaagcttccaccgtttatccggaacggcggtttcgaaaaacgattgaggtcgtaacttcgaagcaaagaagtaagtctgttgagttgatagaaagaggtgttatcgaaactgttggcaaattcaacatctgatgcacggagaaagtgtagaaagaattggtctgactcaaggcgtttcccaatgagacatataggtgtcacctggtaccgatgctccattgatctgatctatagttacacatatgtggtgctccaggctaaggcctgctacactaacctttgccttctaagttctaccttgagatatctatccatctcatcgttataatccatcaccacttgggaatcccaagctgatcttgaaggaagtgagttgtggtctacggacaccaaccccgaagatataggcgatatatacatcgaaggcttcaaacggggaataaagacattccaacatgagaaataacagacagtgacacaagacaggctggcgatcaggggcttagaacctctcaacgggagagtcgggtagcgcagtcaatactcaaaacgaagactgcaagctaacagaagatgaggtaggggaagagaggaaagcaaatccattgaggcaataatcacgtcactccccgacaacaaacttatgttgtatagtttagcatgttgaatcggggtcagtctactttttagatccttttgccaatggtgaggcatttgatcttggttgcgctctccaaaaatagttattgactagttaactagttagttatctggactgattgactaagggggtaaaggaggagctcttcaagatatgtatgtataccgcggcgtcgtgcataaatccgacacgtgacccttccgagtgtggatggataggaatcacttgagcttcccctattcggatgcaagctcaggccaccgtgttctttttttggattgtttcagcgtcactatgggcttggctgttacttctcctcagaagtagttgaccgctgtatcaacacgagtgggatgattcgctgttccccaccatacacatgtcttgactttggtcgaccctgatccacccgataaacaatttcaccacataacaattaagcactgcattgcaccaatctcggcccaattaccatacctaccgtattatcaccctagatcgatcctcaatccttcttggaacacgaagaaacggaaccacgaggcgtggaaccccggaatctccagacaactcgtgcaaatccgacctgcaccaattgaacacaatgtcgacctcattcaattggaccgcgttagcggtagcaataaccgcagtcttcatattctggaccttctcctcaacgtcctcctcacccttcacacggtccttcccacgcctcgaaaacaagcgcatctgcctcctaatcgcacacccagacgacgaagccatgtttttcgcgccaaccgtgctatcactcaccaagcccgagctcggcaaccacctaaagatcctctgtctcagcaccggtgacgcagacggcctaggcgagacgcgcaaacaagagctccaaaaatcagccaagcacctcgggctgcgcagcgaatcggacgtcttcatagtcgacgacgtgaaccgtttcccggatggaatggacaagaactgggacgaggaccagatctcgtcgctgctggcctcggctttcgcgccggaaatggcggcccagaagaagctgcccggcaagcgtgtcgatcgtgataaggctcctgccgctactatcgatgttattatcacattcgacaagcatggtatcagtaatcatcctaaccaccgctcgttgtactacggcgctgtgaatttcgtccgcacgttgatgaatgataagcctgggtttacttgtccggttacgctgtatacccttaccacgacgtcgctgtttcgcaagtacgcgggtgtgcttgatgcgccgctgtccatgttccttggtgtctggagtaacctcattgctgggttgacgggctcgaagaagaagggtgcgcgggctgaggttggtcctgcgcggctgctgtttgttagctcgataaatgagtggttgactgcgcagtctgccatggtcgtctgtcataagagtcagatggtttggttccggtggggctggatcactattgggagatatatgactgtcaatgaccttcagcgggagaaggtctagatgactgccctttccttgttcctgttttggaattctgatgctctggatgaagagctagcttcgtaactgtgctgcttctgcccggatcttgtgtcattttggccgatcgcctttgctcacgcttcatgtctgcatatgatctctcaaggcctaggtgccttcttgtatactcatctctactattcggcttacgcagctcatgtctcgagagccttcatgatggacatacatgtcctttagtacggaaaaagtccagagacgaaaaaaacacgaagtgaataatcatactgcagatgaaattgtacaattggatatcatgaatggtggacatcaagcacaaatgcttcaaacgatacaaaagaaagccccggtcaacaccaaggattgctatcccgccagaagatagaattctggggtttggcatcaaagcctagggcatgaatgcgaccataaaaccctgccgaagggttgttctcttgcgacaaaggatgatcttcggggtaatcaaccctcgtcttgagccttctgagcttttcctttaattctttggtgtgcttgacctggaaggagtagatgcgattgagcggcgaaatggacgggtccagctgcgggtactcataaagcaagatttcccagaatatcctgtcatcgagaactttgggctcaactggatggaacagttccgacccatttgggttccgccgcgcatgaatgcggccatgcaggctcatgtggcggctcttggaatttgtttggccttggaaatcgactgttccaacatccccgtctctatattcgtacctattacgctctggcaggaagtctttccattcttccaatagcataggccgttcttggagttcccagactttgagcgatatgtcgttccacctctttgtgatgatcattgaataggctatgcgttgcatttgataaatctgttggaagacttcgagccggaggagatcgtatgtgttgatggcttcagcgagcaggggacaccgtagtagtgacaggtctggtttcacgccattctctcgttggtacttgattggatcccgcactttcctatcatcgttcgccggtggtctcatgctgtccaaaactggctgcagacattgcacaaccaaatctctcgcttccttcctttttgccctcgtttggctcaagacgtcatatgccttacgcatgtctgttttgcaggcctccaggtcgccgtccagtttgttggtttgggtcatatatcggtacatttgcagagtcgcaggaacattgtacggcttcgtcgtcaatacctgaaacatctcgcggaccatgtctcttggcactttgcccgttcgcccatcttctgcctgtctccgcttgtgttctttggatagagtaaatgtcctttcaagcaactcggaccagaccttagctgaaatggtgatgttgtacgaggaagccatgaagtcgactgttctcgtggcggcgtatatgtcgttgtttgtgccaaaggcatgagcaacggcgaaaagaagacgctcggttgggtacagaccggaccaagtctcatagggcgtaacgggcggcagcattgagtcgtccctctcagtcaagagggcatcaacatcaacattccatacagtcttgaggatatttttggcggcttccctgtcgccaactctggccgctgcgaggaggatgttaatgtatgtctgctcgtccccagtaagcccgtcctggctcatttgactgaatatatccagcactgttcctttgacactgttccacgccgttgcaaagccacgccatccaggattcggatctaccatgcggcgctttttgtagctgtgagggatgatgcgagtattgtatgcttcttttcccacataacaatggttccagaccaatcctgccatatagtgattatagcacgctgtgtcgggagcgacattgttggcatgcatcccatcccaaagggcattgacgagggggccatttcccatcgcctgagcacagtcgaagaggtgagtgtactcggctagttgaggtggatacccagccacggttcgatactggatgatcgtgagcaagtcccttgtaaagtcatcgaacaccgcttccaatgtcttgagtcctagcatcaacacgccccacccgtgcagtgtatggtggagatctcggtagggtatcacgaaatgagccggagagaggaggtgcagggcttcgataaacacggttggcggcagcgatcccactagctctaccgaccgtggatcagccatggcttccctcacttggtttggttgtccgttttcaataactcggaagaagttcgccctgtaccgcgcctcctcttcgggtgagatccattccggtaaagggacttgtatttcattttcgaaagtcgcaggacgtggaacagcgagttcgctggtccgttgtcgacttgttgtagtcaattgccgtatggaactatgatagcaagtttgttgtgttctttgcgcaaaaacatcccatgtcttcgtatttggagatgccacgacacaagcaatttgcctcgggccactgagatgaaggtatgggggaaattgtgtgggctttctgatgccggctccaggacgagacgagacaccccagcgagaagcgcacttctcggtaagtgagaactttagcatggggaaatgatagcgaggaatcagtctttaaaaaacaaaaaaaagaaaacaaagagcacaaaatcacaaaacgaccaggggcttgaatgaggggaaggtgcgcttcgaccccggatcttttgacagggtacttcatgcaagttgtgattcaaactaagcacaacaagtacaagacccctgtacaaatggttaggcgagactgtgtcagattacatgattctatgattattacatgtggttattatgtggtcaactacctatatcgcacatgtacagacatccaattccattgatccacctctatacatcacccctgggctgtctagatcgcgtgtggatacttgcaagacagaaaacccggggtaattgctgactcagcacacgttctgccaagcgccacgctaagccacattgggtaccagccaaagctcgttgattctgcgtgtggaccggcacttgacccaaatccaatcacccttctatcatggccgacaacgaagataccggcggtccatccgtctcagagcccctggatctcgttcgtctctccctcgatgagaccgtgttcgtgaagctgcgcggtgaccgtgaactcaagggccgccttcacgtaagctacccccaccttgcaatcttcagaataactactgactatggtacgtgtgtacaggcctacgacagtcactgtaacctagtccttggcgatgtggaggagacaatctacgtggtggaagaggatgagaacgaggaggagactttgcgggtatgggatcatatgaatcagagaagtttacgcgggcataggctaatctaggttatcggatacagacaatcaagaagcaagaagagatgcttttcgtgcgaggtgagttggagcaattatggaatatcttgggtgggttgctgacttctacctaggagactctgtcgttttgatctctccccaggcatgacgagcttgatatgcccttgatatagagcacggcgtccagcgacgggaacaatactgggaaggacacgagataccacaaaatgcagtcaacatagataggtaacgataccatggaaatcgattatgatcatccatactagtcccgttggatatagttggatatatatccttggaagctagaggaggctgagtattccatatgcttcgacattcttcctagtagatttatattgagtcactggtgagccctgaagtctgcctgggcggtcgatgactcaactggtgactccgacttatcgataaagctccccccatgcccctttgtaccttgtactctcaaccggaatacttcaaatattcacttcagtctcttttatcttttgttcattgagcaaaagagaactatgatcactcgaataacacttcaacttcatatcaacagtaacggtggcccgatccaccgaccaataacgtcactaccccaaaaggcggcaccgcgatcagtcaacggttgaacttctcaactccacacaatgcctccaaccgggaaactaagctacgaggagcgaaaacgaggtgaagtggtatgtgtctccagggaatatgtgataagtgcctcatcttatgctcttcaacttaggctctcagtgaattcgccgagtatgccgataaacagcaagcccaccgctccggccaagtcgcacccagcgacagcagatattccaccgccagtgtgtcgcgcgatctagaagatcatgcagagctcgacattcttgatcagctagggctctccgatgccccccacgcggccaagctgaaggagctcctactcggtacaggcgatgccgttgaagacagcctgcaggtgctagctgggacattacaaacacgcattgatgaaggccatggggagaccatcttcgatcttgggttggaggatggtggtgaatccatgggcttcgacctcgatcaatggaagacggcgctgcagcgcctgcgcgaggcggccgagaccatcaccgcccactgccgagtattgctgacctacaacgtcggaggccctgaagaatcacctgtcacgcatggccgagtacatggcgcttggggcaaggtcctcgtgcgccatcaccctgataccatcgaggaaatggcggagctccggattgccgtagtggggaatgtcgatgctggaaagagcactacgctgggagtgctggtgaaaggtggtctcgacgatggacgtggtcgtgcgcgaataaatctattccgccacaagcacgagatagaaagcgggcgtaccagctccgtcgggttggagatcatgggcttcgacagccgaggtgaaatagttagcaattcgcaaggccggaagctctcctgggaagagatcggcaagcggtctgctaaggtcatttcattctccgacctggcaggccacgaacggtatctgcgcaccactgtcttcggtatgttgagcagcagtcccaactactgcttgctgatggtcgctgccaacaacggtcttatcggaatgagcaaggagcacctaggtatcgctttggcccttaatgtgcctgtcatggtcattgtcaccaagattgacatctgcccgccaaatatcctgcaggagaccttgtcccagctgaccaagattctaaaatcgcctggcgcacacaagattccaatattcgtcaagaacatggaggaaaccattaatacagccacgcaatttgtcagccagcggatatgtcctatcttccaagtgtccaatgtcacaggagagaacctcgacttagtacggaccttcctaaacatcctgccccaccgcggtcaatatgaccccgatggggccttcgagttcctgatcaacgacacattctctgttcctcacgtgggtacagttgtcgcgggcgtggtcaaatctggtgtcattcatgccggagactcggtcatagtggggccagactcactcggccagttcaccaccacagtcatcaagtccattgagcgtaagcgtatcccggtgaatgcttgctttgctggccagtctgggtctttcgccctgaagcgcgtccgccggaaggaagtgcgcaaggggatggtagtattgaaaaagatggatgcccctccaaaggtgtatcgggaattcgtcgcggagggtaagtcgtcaattcaggttttattgaccacatgctaatgaaaatagtcctaattctttcgcatgcaactaccatcaagcctaaataccaggctatgcttcatgtcggggcagtcagtcagacatgttcagtcatcgacatcgatcgccctttcattcgtactggagatcgagcgttagtcgcatttagattcgtacagcgtccggagtttttagcccccggggaccgtgtcctctttcgtgagggcaaaacgaaaggactgggaattgttaagagcatcgattatgacccgaccaaaccgttgagtgcaaatgcaaaggagggagcttccacttctgcacctacgatacctcatgattagatttactgttgctttactttcaagggagattctttgttcttctttctttgttccttcacgttttgatattttccttgctaagcgttcagacatcgaatccttttgtttggattctatttgtgttttatgtttaccctgttaatacactggtcaattggctatgagctggctagattactgtagttctattattactaccttgtgcatctatttgttgctacttgctgtagtatgaggtcacatgatatatattgcttgacgtcactctatgacatacgcccagaggatcgccgctttcttacatatgtagcagtccagtttatatcactggatgatcattcgcaagccattgagcgatcagtggaattatatcgggtcttacgaaagactgggggtccatgtgcaagccaccgtggcccaacaccactgacgtattgaacaacgcggcctcagcctgtgggttcttaaagcttgacctgcccagagcttctaagcattcagcccactcgccacttacatttcgagtataccaaacaacgctttatcccaccctgctattatcatcctcctttacttagtatacttcatctgttgtcctatcatcctttcaccaaatctctatctatacccattcgacatctgaactataccaacacgatacaatcatggagactgtcaccaaatacgtcaacgctgcttcgactgccatctggggcgagaatgactccaataatgcccaacagcacggcgaagagcccgcatccggtgtgcaaggccaaggacgtatcaccgacccctatgatggcggcaaccgcgatggtaagtacaatagttataagcatatgtttatacaacctcaaagcacataactgtccaatatatctaacaatccatccacagagcaacccggcgcaatccactcaaacgccaacaccgcacccctaaatgcccacctggacaacaatcaatcaaagcccgaggtcactagcatcactaccccccatgcccctagctctctcaccgcctgcaccagcatcacacccgctctgcctgtctccgacggccctacagcagacagcgaagacaaggaaaccaagcccatctccagcggatctatagcagacagcgaaagcaaggaaaagaagcctgtctccaacgactcaacagaatccaccgggagcaatgatgacaacagttctaaacaagaacagcgcagcacttcacaggctgaaggtggcgagagcagcgaagctccccacacaagccgtacccatgacgtgagcaaagaggcgctcaaaggcccgcagggtcctgcgccgacgcctgctgaggacttcgagaaggagtataggggaaagaagcctgcagctgaagatgaggatattgagaccagtatgtttcccttttcctgttctcgctttgtcgtatttggtgctgacttttgttatagattctccaagtgaatctagcgggaagtcgcctttgaagcctgagcgttctcctgaaaacggcgagaagaatgggaagctctcaaaggtgaaggagagcgtcaagaagcatcttcatcattcgagcaaataagagcagcgtctttgtttacatcggatctatgaaattgtgattgtgatgatgcctcagttactttgacttcggatttgcctttttggaattttgaggtcatgtctatattatgccggcttgtctatttgacacgccttatttcgttcgggtgtattaatatccaattgtatttcaatcatttaaaatcttctttgtaaatgtgatgcaaaaaaacaaaatgagatttctagggctataaattggaaataaatggtaatttacatttcaccaaagtccaatctcaatctcaaatccacacacgccggagcagggtatcccaagtgtaaacagaagcaagcaaccattcggccatcgaaacaatcactcgaacaacattttcaactcttcaagtctgttcttccctttgtcagattcactatcatcgccgccaatcttcaacccaagcgagccagcaatattcattttacgctcttgcacgcgcagcatgcggccttctatggaatccttgaccacgaatcgcgtcacattgacatcgcgtgtttggcccattcgatggacgcggtcgatggcttgtgcttcaattgcgaaactccaccatggatccatcaggaaaacattgcttgcggtggtcaggtttagccctacgccgccggcacgcagggagatgagtaggactgtaggggctggcgtcggggatgagggagagctagactttgcaggcccgcttctccctggggtatcgtcttccatgtcgacgatgtcatcgtcggtaaagctttctgctttggtaaactcggctagaacagcggcacgggccttttggggcatcgagccatcgaggcggagatgcgagattccgactttggagagctgtgggccaattaaatccaagaaagatgtgaattgggagaagacaacggatttggtatttggagggatgcgtccgagatgattaataagggcgtggatcttggctgaagtatgggcggaaggagatagggggtatatgcgacggagggagattcgtggggcaggttgggagctggttggcggcgtgctgctctcagtgtcgtctccgaaggaaactgaatttgaggacgggtgtcgtactacttcaaaggtattctttgcatccactggggcacggcagttgaagcatcgtgccttgacgcccttgttcatttggtgttgcaagaagtcttccaggcatttcttacacgcactatgccagcacgctgttacagctggatcgatcataggctcttcacaacagatagggcactcgccactagactcggtttgaatctgccgaagagcatgggcagtgaacttgaccatcgttctagatgtttctcgagagtcggcattctcgttctctgccgtgaattggtcaatgagttcttgaagatccatgtcatctttgaactcattggttgcatcagccactaccgccgcactctcttcttctgcaacaatggctttgttgcgtgtcattatcgggtggcagcaggtctgacgaaggcggagaatttgagcgaagattgtgctgtaagacttcaataatgtgccagccacgacgttgtcattatatgttcgtttcgctcgggtaaatatgcagtcgtaaatttctcgttcttgctgagataactccacctcttcaatagtgactgtctttttgggcaaagggaccagtgggtcaccctccggagttttcatcgatttagttcgccgaagaacaagaggttccagtacactttgcacgacattcagggcccgcacgtattctttggattcgaatggcacggtgataaacgtcttccagaaggagaaattgctccatggctccactttgaggaaacgcaccaggctgaagagatcctcaaggcgattgacaatgggtgtgccagtcagtgcccaccggtgagctgcttttaactcataacatgatttagcagatttggaacgacggttcttgatcacatgagcctcatcaagaattactcggaagaattccacagagaatagacccccgtttgcacggaggcccggagcagacgactggagaccgagctggcggaattccgacaataccacaccataactagtgacaatcacctgtggagctgtttcatgattggattcgcagcataaatatttcaaattgacagccttgtccgacccgtaataaacaagaactctcaacgtcccagctttgagtgcctcgctttcccattgagagattaaggatgttggtgcgactaccagagtggtgtacggtgcatgcaccaccccagaggagattggcatcatagcaaggtcgttcaccgagctaataccattcgaaacctgtggatcaggctcaactttgtgagaatggaccagactgagcatctcaatggtttttcccagacccatttcatcggccaggattccccctcggcagtgttgctcttgagcaggaaagtcaacactgagatctcccgaatatgggttgacatagaaatggtcgatgtttttaacctgcggtaaatctttgtcgtcaacatccttcctgggccaaatgtattcctcccacaatggatgcattgacttctctcgagtctgcttcgagtctttctcttttgatatcatccaatgaagggcttgttgctggtacttgcgcagatcaagggtgaagctaggtgctggatctgccgctggcatgttgaaatcgaaagattgagctttttgatacaacgtatcgagctgaccttcttccagttcttcgctgtcgtctccgcctgatgagtcgttggcatccttatttgatttgttcttcacgttgtcatattgttctgcaatttcagcggcacgcaaaatgccatctcttttgtgcttttccgtagtcgggttggtcgaggtaggatgaagattgatttcctgaaacaacttcactagaccgacttggcgtagtcgcagattcttctcctcggtgctctccttctcttcaaacagtccagtggatcggttgtcatcagtgttaagagcattgagcgccgcgctttgaaaggcttcctttcgcaagtagactcggagttgtagatatatggtatcgttgactcgcaccttgtcgggtacaaacacacagaccccctcaaaccgacagatcttctgatcaatcagcgtagaaacccattcagcggtctcatgtggcagccttccaatttcttgccccgaggtattcgtgaatcgagtcaaaacatcgcttttgtgattgacaaatgctctgcctgttcggttgcgtttcatagttggctgcgagcgtgcgcgttcaatatggacagtgtctccatgcttgagaaatccgaagccacttctcgttgcccatcctcccacaccaaatgcgccaatataccttgctggtggctgatttggcagtaccgattcacttccaacgggtgtaccagggctaggctgtacacaaagatggggtttccggcttctggccggaacgctgccattgatccgtacaggcttcttccatgatccatcaaagtatatgttaacagctcgctcgatgttattggaagcagccgattgaatagttttgattgaatcggcaggtagttgctctcctacgatactagtgaaaaggtcgacatcgaagccatctgtgatcgtgtttgtggtgttgaccgttacttcctcgcattgttggtctaatccattatggtgtggagagggagtaggcccagcatccgcaatgggtgaccctaggctttccgtcgatcggacttgtgtatggtgctgatctgtttcgttttgcaaactaaaagggctttttggaatgcgttcgattgacggaatctcgtgtttcgggcaatgaggtagggacgcgtctgtatcttggggtttggtgggtaacggtgaggatggagagtcagcgaagaaacgctgtctctttgctgggggttgctctacatcctcgctcatattggctgtacatcgagcttcgtgaggaagaaaaaaggtgggctcggaggagacgcgccgagagacgcggcgagaaacgcggagagtacggcagccgaaatgggccaaattacagtccagcggatcgacgtcagtccctaagggaaaatgttcatggatttgatatctgcactgttcaagacatacgaattctctttctttgaatttctttaatttacgccggtttactatgattctctaatataattctcttattctccaattctgaggtggccagggtatcgctgacaaagattggccggccaatgcctttgccccgattacatcgaatcttttccccagagcttgtcgacatcacattgagcatgtcttttctcaggacagctcggccatgccaggcaaatagagcctgcagtttttatctgcaaagcgtccaatcccaaaaacgacactttagccggacacaatctatttccgcacctattaccgcagaacaagtccaaggcgctcacaaatattgcgttgctcttctctcgtatgaacaccttccttatggtcaccaaagcctactgaagctcccatggaaaattattcagaagctaacataattatctttccacagaaaatatgaccgcccctcctacacactgagtaccttcatcccacgacatgcgcaatccttctatattgcgctgcgcgcattaaacgtctccctctccatgatacccgacaccacctcctctcccacaatcggactgatgcgacttcaattctggcgcgactcagtaacgaagatccttgccggcacaccacccaaagaacccgtcgctatcttgcttgcatccgccatctctgaactccacgagcgcacgcagggccgcgcgcacataagcaagggttggctgacccgtataattaactcgcgggagcgaaccctaacaaatgacccatacccaaatatcgccgcgctggagtcctacgccgagaatacatactcgacactaatgtacctcactttgtcggcattgcccatggcctcgataactgcagatcatgttgcatctcatattggaaaggcagtggggattgcggctgtgttacgtggactgccgtttgttgcgttccctacgccacctgctcaagcgcctcctggggctgcgggttccgcgctaggagggggtgcgaaacaaggagccgtaatgttgcctctagatgttatggcacaagctggtgttaaagaggaggatgtccttcgatatggagctcaagcagagggtctccgggatgcagtcttcactgttgcgacacgggcaagtgatcatttgattactgcgcagcagatgttgaacaacctccgcgccggggaggatgtcggccatgactttgagcatgaaggcgaagagggtcatgaatacgacctttcccctagtgctcggagcagcgagtcaccactcgaagaggtcaaccgggcatttggcgttttcttaccggcggtcggcacgcgcatgtggctggatcgccttgaaaagcaagactttgatgttttcagcccggatttgcttcggtcagactggagacttccgtggaaggcttattcggcctatcgacggaagtctctggaataatggcatgtaggccatgtataatatgtgtaatatactacttcaggttttggaccgttgatgacttcttttgtatatgaggaatgttaaaactgttaccacgatgcaatgttgaacagtgaaatatacatacactgatctctgaaatcatactatcaacaaatgagttctaaatactgtccaagtgaaaagtatctgtacaaaacctgagaaggtctgagcaataaaatgtatcaaaatcaagcaaaccccgcacgcggcaacgcctttatacaatgattgggacagcgagctgtaggacgttcatgatctatttcttcgtcctctctcgtctctgcttcctcgagctaacaatcaaacgtcgctgagcaagcatgacagcgtagcgttgtattttgtcgcgcctaaagatgcaggttagtgtcggctgttttcgagaggaatatcagaactcacatcaggtagaaaatcgtaacgaggacgaacggcactgcaatcttccagaaatatcttctaaagtcagcaacaagtctagaagaaaggggtcgaaagacatacccttcactgtgttcgattcccgcgaaatgcgtgaagttcattccgaaataaccctaaaaatgttagaggattttcttcatagtttcaagtcatacatactgtcaagaatgtcataggaagataaagacaagtcacaagagtaagctgcttcatactttcgttctggtaggcacctgcacaggatattagtccgttgtttttctcttgaattatccatagaagttgaacgtaccaatagtgttgaaaatgaggtcaatcatgttatcagcgttgcgccgcatctgatcgtacccttcaacgatagtaatgcaatgatctagggcatcgcccaaatatgtatggcacatagagctgatcgtaacacctgtgcctccgacactcttcagatttggcggtacagtcccaatatgtgggcggggatcaagaaattctgcaggagttgcacctgggctaaggggattccttaggacaccaaagcctggtgtgccgacgggctcagaccggtgatcacggagagcgttaatcacagccactataggctgcatatggttccgcagaacagcaatctcagatgtcaaaatatataaggactttgactgttcaatgtctggatcagtcagaacctccagctcgaggtctccgatggcgtcttgataagccatcgttactggaatcgcaagatcaatcacagcatccagaatggcctgcaaaagcatactggcatcgcatgactgtcgaaggatagtctctggcgtattgaggcgcctgacaattggcgactcgatgtcatccgcgctcgtttcaaaaaaggaggtcacctcattatcggtatgtaggaagatcgaaacttgttccaaagtgacacataatcctttggcagaaagtgcagcatggcgttccatgaactcaattcgatcttcattcggaccaccgcgatatcgctgaagactcctggcagatgtgtctgtggtggccccaacatttccaaaatgggaattttgtgttgaattttgtccaagcccaggacgaacgctcgatccatatttcgccatatccttgcgctcctgttttgtggaggatctgaacctgaaaatgtccttcaatgccgccataataacactccacttcgtgggtcgcctcaacgaaatcgagctcttgtcactgaccacagaacttttccggtcccttgacttccatggactgactggattttcctcctcatcttccgaatcagaggagtcctcttcttgtatcttcaccaacttttgcaatgtcagtacaacgaaggcatggtccgagtaccaatccactttcgtgcggttagtgtcatggacaacatcctcaattgcaagccgatgcaatctcttatgatttccaagaatcttgatcacatcccagctcaacccattgacattgatccaccggcattgcacccagggctctttctcccgctgcaaaaattgctccagtgtgtcattgtctaactcatactgtcgcatttcatgttgtgagaagtccaccacggtgatctggcagcgtcgttgtaggtccgctggtatgttggacgaccattctgacgtgtatggcggtagcggcttggttgggtcaatgccgggttcggttcctggttgccaattgggatcttgtgcgaatccttcggggtggtatgagcgggcggtattgcgtctggctcggcgttttgtcgtctcggtggagttcactcgtgctgctgtggtgaatgcgggagacgcggctccctctctctctcctactgttggagcgacttgggaactgactgacgggcgacccgcctcaacatcgacctcgggtcgtgtcggaccctgctgtgcataatcgactgagtgtatgctcatcttcacggtttatatagatgtgcacatctaatcgtgacggtggaatgacgggttctcatcggctccggacttcgatatgctgcggctcaatgatgtgaacccggcccaggggttggtcaatgcctggtgggtatatacccaggatatttgtacaattggtgcacctctcatcgagacaccacttcgggggagaacatgttgatgcgtgcgggatatgaatgacgtcgaagagccgttttctgccgcgtcctacagagatagttaagacaaaaccggtcaaatggaaagactgaattttaacatgaaagataacaaagacgagaaaatcgaaggaacgaaagaaaagaataaatagtaaacaggaaaaagaaagaaaaataatagaagacagggggtttcccgtacacagggggcggagcgccttattttattttaagggagaggatggacgggcacagccctataagacactctacttcatacgcgtccagcataggctatggagtacatatcaggactcttgacctcattgagatagattcgtacaagtacatataagtacacgggttccattccatcacatcacatcaccatgcaccatacagtaacgccgtcccaatgctggcttccaatcactccagatataacaacatccacaatagttaaacaagatagggaaagcagagcaataattacagtaaaaaaaggctgccaaagagaatataaaggtaatgagaggaagagaaggagggagacagcattatactcgggctattgcccgtggtttccagggaggacggtggagtccaatttgaggctgtttattcccatgaaaactaggccgggagccgtggaagtcgggatagaggcctgactccatgtccatcagaaccgcccgctggggctttgccgagctccaattggtagaagtacctttcggtttggtagaaggggtgcgaggagtaggagcgatgacactagcagctgcgcgcgtcttctccttgatgatatcgcgaagctctttgtcatctttggtgatttgagctttgatgaaatcaatgtcattggaagcttggaaagcggacatgaccgactcccgtggagtgtatgggtatttgtcgggatttggaggcgactggggtgtgatggacgggtccaagaaagcttcctgatccttgtctaggagctgagtaatatccagcgtttcaccatgcggaattttgtgaggatgagaaggggtcacacagtccatgtcgacttctttgcgaaggacatggtcaatgtcgacggcggagaagtaggcacatgattgggggaggtcatcaattcctacttgctgagagaataaggcacgagtccaaacgttggcaatctgcaaagccattgcagcgcgatacctatcctcatctttgacaaggtagcgaatttcatcgtgaacagtgatggccaagcgggcctgaatgttgaatcgtcggataagatagtccatgctaacgatcaagaggtgaagataatcgacacccgacgactgaatagcccaattgattcgggatgtcatgaagctgcctttattaatgaaacgtcgcatgagcgcctcagtgatcccagcacccaaagcaggggttctaggtcgttcctgatccgcaaactcttcgagtttattgaacacaaaggattcagtgccacctcgccaaaacggcgtctcactcaagaggcgacgtgaagtgcgcgttcccttagtctctttgtacaggttcttggcagtctcttgtgtctgcttttcagttagagacggattgaactggcgaagtaaagtagcggcgaacttgacgcctgccccgtagattcggccgtagttgaagaccttggcgtcattccgcgagattcccagaatcgacgcacttcgtgagtgaagatccgtcccctcagctttagacccttctaagcacatgaagccgattgcgtttcctccgtgaatctggaatggggcatctccgacaagacttgcaatccataattcctgggagtcgacatcggctccaacgaacgagtagcccggcggtgctttgatcatagcttttagctctgacccaacacggttggccttcgcattacttgcagtcaaccaagtattttccacggcgcgtcgagtgatggtccccattggaatgacttgaggcagaataaatccgatacgattatcgccggcttcacttttctctctgcctttttgcgcctgatcttcatagaccacgatttgacccttgattcgatcccgggcgctgatccaataagaacatgacgcattcatatccagcgcttgtttggcaagttcatactgagatgacaggatcccacgttcgaaatactgcatatacccttttccaagcggattggtacacctagcttgtgggccgtccttgtgggggattttgaagtatatggcttttctatcgtctcgcaactcggtgttcttttcctcggtcatatcgcacatgacgactggctgattctcatactgtttgatttgatcacgaggaacgcggaaagtccatccgtgcaggtccgaccaaacaagaggatagttgtcccaggaaagtttgagcagaattggcgcaatgcgagtccgcaccgtcaagttaatatcggcggcgttggaggtaaaaagatccttgtaccacttgggcattcctggtttcttttgcctcgctgccggccgaggtggatcacccttcttctttcctttggccattttgatctcctggccggaccagtccagctgttgtagccaaggatcaatcgtgtaaatgtctggttggtctttatacttcaatgcttcgtcgcatagtgctagtagtttactctggacatcgtccagccgcttatgatatgtttcctctgcgctggtaagatactcttcccatgactcattgactggtaaaatgacggaggataagtgtcgaagagcaccgaaactgacgggatgcgggcaagtctcgagaaaattggggaaaacttttcggtagacacggtgggtgatggcaacatcggcagcacaatagtcgagaagttcctccagtctggccacaatagagtcacgatcaagttcaccgaacagatctctctgcgccttatcgatagtgacatcacaatggaatttggccacatcacgcagggagttcaccgagcttcgcccaacccaaagctcctcctcttcttctctcaacatgttgttttcgagaagtgcggcaagctccacagaatcgtggtcattcgcgattttatctctcatgtcctgattctttttgtggcgcatccaagtcggtctctgttgcgaacacatgccgttgaccgccacatgtagggacattgtgtcgagaaagaagttttgagactgctgcatgttgtattcctcaaggactcgggctcggtcgtaaccaatattgtggccaaccacaatgcgagattgagtggggtctcccaagggtatcagctgtacttgattctctgactcgccaagcagccacggtgatatccatgcataccaagctgtcgggcttaccgcgcaagccatgaccgcaaatggattatctttgtacatgacctcggtgtcgaatgttaacattgattcatttggggcgtcgacaggttcagaggttccgtcagtgtggtatttcgtccatccgctgcgttggacccatttgcgtggtttggccggacaggtaagagccgcatatgacttagcccatgacaggtatggttcggaagaatccattccaagtttgtagaagtgttcgtccaacgtttgtcccttgagagcaggaagatcgaatgcgataggaccggcgccattttgagatttgcccaggagctcatgtcgagctaaatgatccttcgagagagcgactagttctgggtccggaacgcgacctttgttggggaaaacttgagcatggacatggtcgctgagctgttggactccgatgtcattgaatctggatgaggaagggactgcgcgagatcagtaattgcgatttgattgttttcttatcgagaagcgcaaaagacagggcacccaccagaaagagatcgtcttgtggtcacattgtcggcggaagtagagaataatcttgtatgacttctgtctgactggtagcacgatggcggcttaaccaggaacggcgagcttcgtcgcaagaaagattccacggcacccttggaacaaggagtgcaggagaacttccaagataacatcctaaataagaatttggcaagtttaggtcatgttagaagtgtggcgacagccgtaaggctgcactagtagcctgaaaaaaaatccgaaaaaaagaggtaattatgaagatggacgtagctaatttccatatcatcgcctatcgcagatccgggcgtcatgcaggtcggaatattgttttccctgtatgcttgaccgccttctcctcgtagacacttttcacgtgatgtgacgcagtagtatccggcggtcacccctccattgactcgctgaccgccttccatttatagatacacaatacgaagcgggcttatctgatcccctatcgccacatgacccagttgataagacccatatgctggccggcattgtcgccatcacctgctttgatcgctgaaaggcccgattttgccgacaaatttcttcttcttaaacccacggtcgctgcattttgtcttagcgaaatctcccaaactctgaggctgttcgtcggccaccaatcctagatcttttcacaccctctcccacacggcagcacagagccgcatacgactttccttctcatctccagactattgccctcgctcaaccttaacgcaaacctctttgaaagagtcttccttcccactctgttacaatgagcagaaacagggctgatgttgtcgacctgacaaccagatcatcacggcgaaatcctatctctttatcctcctccccgcctgccgccccggaccatgcaacctcttcccgacatggacagtttactactacccgcggtgtcaagcgtcgccgtaattggaacgatgagcatgacggctccttcgtatccccttcggctttctccgaaaatgagcccatcgaaacaatcgacatgaccgacgactcaggcgcggccgcactcgctcgaacagcggccaaacagagggaggatgctataaaagcgcaggcttcagcggagagtgattcaaacctttccgctctactttcttataaatgtcccatttgcatggaaacgcccgtggacgcaacgagtacctcgtgcggtatgttcttgattccctactatactggatttaagcatgctagggcttctactgactccttatctttaggacatctcttttgtcacaagtgcattatcgactgcttgaagatgagcgagcagacacgtggcggtgactcttcaaaacaacacaaggggacctgcccagtgtgccgcacaccgatttcgcgaaaggagatgccggggaagtctaagaatctcattccgttgttgtttctaacaaaaaagcgaagtgatcttcccgtatctggcccatagagcctttatacccgcttccttggtctcttcaaatctttgtttttctctcgactcttgcggcattgggaatcggagcatgggcatgggtggtatttttcagggttttgcataagcgttcacgagctgggattgacaaatggagttccaaatccatggattccattgattaatatggtgtgtagatgtagttgtacctcgaactattatagtacaatattaacttctaaacagacactattgcatatcctttcggtctcttcttgcaggatcaagtgtattccgtcgacccagcgcatttcccaatcccccacgaaccattgcatcccccttcttccccaataccacctcaatggcctgcacaagggcattggggtcatattgcatccccacaacggtctccttatctccatccctggccgtggtttttcgtccatagagacgaagcgtttcaatgcccatatgtgtgagccgctcacggtccacatgcggtgtccccggaccatccagatgcaagatatgggtcacatagttggtataaggaagggctctataatttcgaacattttcttgcaccgaagtagtcgctgagttgtgactttgatgctgagaatgaaaaatcggaccccgtccacggctctcctctccggcgcttacaattgcttccacaaaatcagacgcgacaaatggtgcggatggaggccctgtttcccgatccaatgatccgttcaaaatgaggattttgtgtcgggcgggactggagacgatgcttttgccgacgcctcgcaggatgatagcagggatgattgatgtgtagagagatccgatactgtagataatagcctgggagtcgtttattgcttcaagcactcgcggatttgcgggcggtcggatctcttggccgtaggggttgatgtaccagatgcgagtgattcgagaactcaaatcttcattctcggttttactgaatttgatattcttgttgcggagagttgccagagagccaggaagatgatcctcctcgtatattgtcgggtccgacatttcggaatccgtgtagtcatcgtcgccatcggcaaggagcagacttggtctcctggagctgggattgtgctcgagggccgtcgcctcgcttggatgcgagatactattctgaccgacaatcacagttccatccgcaagcgatgcagagatatggtgggagaaattggagttgattgctgggatcacgcgcaccagatctgacgggacgccgcatatgctcccgagtaggtagatggcactttcgaagcttccactgaacagccgggcggcagtcaagaaaagatttccgacacttgcggaggtaaagtcaaaggttgatgatggcggtcgggctcgtttcagaatttccagatttaatacattgaagaatgagcgtatcaactctttcttggcgggggtgatagctgtccatagcccagacgtgccgtccacgatggactgccattcattggttgcgctgcctgcttccgcagacagccgatggttaaacaatgccttgacagctgacctctcagggtttgtcaacgaatccggaatcaagcgtaccaatcgacctgtccgacaagttagcaaggggagatacgaagtgttgggcgtaagttgtactccgaacatcgccaatcccagggccaccgaatattcgaatcaactcggaagaggatcccccgttatcactgattgggatgatgtagctaagtgggcaattcttgttttcacggacggcgttgaatacatcgacgagattgtttgccgcgctccctcctgatatgacaacaatccctctattggtcgccatgggcagatatttgttctgtcgcttgtgtccaggtgataaatccgatggggagggacaaatgtcgagtgaatattcagaagagtgaaatttaagacattggggacatgtctgggcccgaacgcgcaacaatgacacatttccacagccacaacacaagaacggccaactttgcgcataaatagtttgagcgtttagaattgaaaacctcttttgtgaataattatcagattcaaatgggtctacaatacacgacttctagtctgagctatttatagagtcggttgactatggtatctctacataggtagccgttgatttcttcggtatagttgtagacataccaaggtcctatgtgccatattctcgaaatattttaatttgggctttgctacgagacaaacaatgttgtggaatgttcgtatcgaacaagatcgtcgacaaccattcagtatcttcaaccctatctttcctgtagaccgacgattccgtaaatttgatgatataagtccactaattccagactagacatgaggagtggttgcaaaaggctactttcatatcaatatccccctttaacctggcaagtgtatactgagatgtctatatctgtcgaataccaggctttgcacccacttgtatcacgatcgatgtagacgccgagaagaagctcgtccgaaagatcgatctctatttgatgccttcagtttttattctttacctgttttcctacatggtattttaatctatcatatcaattgccaactatattccgctaaaagtaccaggacagattgaatattggtcttgcaaaaatcgccggaatgaagaggatctgcacctcacatcaaatcaatactacactagtgtgggttattggctatactatctctggcgtaccatccaagtaagatgagagcctttgtgtcttccacatgaaaagcgctaagactagattcagcataattctctctcggactcgcttatcagttttccttccagtaatcacattcgcatggggatctattgcagccttaataggtgctgtccgtcatcaaagtcaactgatagctctgaggttccttcttggagtcttcgaagcagggtttagtgtgagtgactctatggatgttataaatccgcttttaaatttgataaagccagccgtgatcttcttaatttctacatggtatcgaaagaacgagcagtagattgcttatacaattatacaacagcacagccttgaatagcgcttactcgaagcagatcaaagcggttcattatcttcctaaccgcaggtatactcccaggagcattcgggggagtaatctcaggagctatcacatcgacattagatggcgcacacggtatccgtggctggagatggctcttcattgtcgaagggctcgcaactgccgggggaagcctgatcgtccactggactctactcgactaccgcacagcagtcgcgggctatcccccgaagaacgaaagctatcccaacagagactcctcgaagacggaatcgccgatcaaggcgactcgaaagaccagaacatctcgatcttcgtgcttttgttcaaagctctctcgaattggcaaacctgggtactgatcccgggctacatgaccatatcgggagctggggctatttcatacttctatccaacgttgattcacgagatggggtacacctctaccgccgcgcagtatatgacggctccgctctatattgcgtctctggctgcggctatccctatttcctggttggctgaccgcaaaccccatgctagggcacaactattgatgggagacatgatagtcgggatggtgtttttcgctcttatagcgggcattcgaaacaatactgcgcgatatttgtttttgtgcttcattagcatgactttttggacgggaagcgcgcttgctctttcgttttctcctacgtctctggcttcataactgttggagcgcggtaaaactaggcacaatgcttcgtcttatgctctcgaggggtcaaatgcttagtgtttgaacagacaaacaactaggcggtcaaatacatgagatcaaagtgtatattcaggtctggaatagtcaatttgtctggtctgatattcagtacaatctggggctttctttatagcaagcaaacattgcggatagctcggcaaatactgagatcaggttgatctcataactgactagatgatttcatgattttttgatcagatgaagtcatgacttttatcagatgagatgaaacagaataaatagtgcaaagtaagcaaacaatcaaatatagaacacaaattccaacacaccccttcagattttgaccttagtcaaaagctgcaattatgggatgaaaagctaacatagatcaaacattgtcaaactcagtcacccggttaggtaaccgtctcaaattcagctgattcaggaattcaacatgcttttgggacggaaggtgttttgtcaatccgtcggcgatcatattgtttgtctgaatccactggagatatatatctccatttcttaccttttctcgcaaccaatgttgattgatgtccacgtgacgtaattttgtctgatatgatgaattgggtttgatcatcagatcaatggtctgtttattgtcacatgatagtatcagatcgttttctgggtcaaattcaattgatctgagcaatcgtttcgtctaaagtaggtgctttgctgcctctgaaagggcaacaagttctgcttcggttgttgatgtggtaacaattcgttgttttcttgctgaccaatcaattagaccaccgaaaagggtgaaaatgaagccttgagagctttttcgtccaatgttatctgcaaaactggcgtctgatgctgcgcgaaagacgtatttaggatcacatgacccgtcgaattcaattgaatgatatctcgtcccataaaggtacgatattgtttgttctgcagcgatcacgtggcttctttctggcttagtaagccattgaaaaaggatctgatgtgcaaatgcaatatctgggcgtgtcattattgcagcaaaaccaattgatcctaccaatgatcggttactcgtgatgttcgtgcgatcatgctcgcgtggatatttgccgtcggggctgtttgttatggcctggtaggtattttgttcaagcgttatccatgaaagtaatatgataactgcgaagatgtctaccttgagacattgaattgcaatcctcatacgcaatggaatagcaggactagatatatagttgacacaacatatcaatttcatacagccgtttattataaatcctatccccaatgaaaacagctaaatatcgtctatgtcctctacctgtacatgcatgttctgtcctgtccagacaagacaagacacaatctttatcaaaatttaacataagcatcggaataatttacccgagcttggattcgtgaaacaataggtccacgcggaatgtgctccgggtattccaaatttccatcgattgcttcagttcgccaacgtatgcgatttcgtgcttagtgagtcacctgagcagcagcagcgggggcggaagagctaccactgtagaggacaagcagaatgagaacgcaaggcacaccgatgaggacggccttggtgcgggcagggttgctgcggttgtactcaccaacctggaggcgcacatcggtaacaaggctctggcacttctcagcaccgagcttgtagtacaccagaccagccagggcaatagagtaaccgaagaactgctgagcagtgacggggtcgcggaaaatgaacatggaggctccgaccaggaggatatccttgaggataccggccatggtcaggacaacagcagaagtcttgccaatctattggtgtgttagaagtagttactatctgtgggatgaaatgacttaccagcaaaacaacagaggcgttaagaaggaaagcaaccagtgcgttggcaatgagagttccgataccgagaccgtagatatcacccatggtaagacggggagcctcagcgaaaagggtgacgacaccgttagtgatggcgcaggccggggcgtagtagtagagagagaccaaggggtccatcttgaactcagcggaactgagcaaacgctggaccatgacaagacgaagagcctcgaagacaataccggcaatctggactgtaaggttgttaggactagaatgtcaaatatatgagtaggacatataacatactgaggaagccgaccatttcgaacttgatctcgccgaacgaggcaatcacaacaccgacaacaatgagagccacgttgccgagagtcttcaagttggtaggagcgattccgaaagcccaggtggccaacagggttgcaacagcgttggtagcctagagaatattagcattgagtcgaacctagcgtttaagagtgggcggagatcgcaattgacgcaattgaggtcaacccccggttcaaacgcaccttaagcatctggatgaaggaaacactcaggtagaggtatgccaagttaccgcagatcagactcaaactgaacatgataccgataggcacaatggcacgtctgcattgcacaaattcaccggttagcgatcgagcattccggtcggactgcggccgtcctagctatttcatatcttatcggagttgctcacgtataggtggccgggttcatagggaccttgtggcgggagtcaagcacggtagtgaaccgggcgaggatctgggtcatcgccgtggcgaacaccatgtgccaggtggtcaagaagagcgctggtggctcatgtcagtaattgattcctccgggtgcggttgaaactcgattggcggatggactcacggaagtctagaatcaatagcggttagctgcacagtccatcatgaataggggatcagagataaggggtccatactgaacttggcactcgcaaggacccatttgttgaataggatgacgctggaactcagagcaatccacaggctagagagtcgagtcttagtttcatacccgacgaggccttcacgtagatgttacgtacgcaatgtagaagccggggtggaggccgttgtccttgggggcaggagcaccgccctccagcttacgctcatcctgcgacgagcgaccgtttgccatgatgaaagttaaaaaaacagtataaaagaatgactgtggtgagtaggaaaaaaaagaggtggttagaagggaagataaggggaagaaatgatttatgaacgatcggcagttgaccctatggagacgctccagcgcgcacttccaatcacaacgtcggtctaacaggtgtgtcgccccagtgtttacacgtaatccccaagccctgtcgagctgagtcctctaagagggttccagggttattggggatcgagatttttccggtttatccctgtcgatcatagcacagcccacctcgaagtcttcttttcttgtctagcgtatcacgtctgtatgaggccaattagggtgatttaaagtcgattgccaagaacacagggggaagatgtagtgagacaacgacaaaggaaaccaatcacattgaaatgtgcaaattatactcggtacatatcgatagagtctattgctgtatgttgaactccgtacaatctaagacataatgtacgacgtacggcgtaggacatcctgacatctgatgctgtagagtacgttgcacttacacgatcacgtgacagggatagatagattttccgcgtccacatcattcattacctaagacatctcctccgaggttacggatgttccgataaacaattgtacagacatcgtcacttccaacatgccagagtcaaacgtcgcggcggattccaaaatcgaccatgctgcctccttaaaatactggaacagcgtgccagccaccacggccagcatgctgggcgagttcccttcagtgtcacgcattgatctacaggggtctaaaactttcctagccaaggtccgccgtttactacccaaagtccagtctgaaggcaaactccaccggggtgtggactgtggcgctggcgtcggccgggtaacagagggcttcctgagccacgtctgtgaagtggtagatgcggtagagccggtagccaagttcacacaagtgatgaaagacagccaattgaaacgagacggcgtcattggaaacatctacacgcgtggccttcaagactggatcccagagaagaaatacgatttgatctgggtccagtggtgtgcgggccacctcaccgattcacagctcattgactctaccgtgcggtgtcgcaaggcattgactgaaaacggcctgatggtcttcaaagagaacttgtccactcatttctccaaagaagatatgtacgacagtgaggatagcagtgtcacgaggaccgatgcgaaattcagacaggtcttcgaggcggctggcatggaggttgtcaagtcggaactccagaagggcttcccaccgtctttcaacctcttgcctgtgcagttctacgccttgcggccgaagacgaccaattagccctcgatgccttgtgtctatcatttgatccttgagagtccatgatgcaatattggtatctacggattcattattacttatcgaacgagtaattctttgcatgcttgcaaaaacctggaatttccgctctgaaatgcgtagattcatatccttcaatcgcccaattcgcatggaccgttatgtacataataaccactttcttcgacggccatggtcgtgtgagaccaaatcaaaattcatacagagcgtctgaatccgctacagaaaagggagaaaccttaagtcgtccaccagaaaccacatccctattcaatttctccggtggagtccacacaacctccgcaacatttgttcgcggccgagacacaccacacccagtatcatctctatgatgaaccaacaacaagtctggccgacacccctgtttcacacataaacccgaataggacgcgagcccgatagccgccctggctcgtgtcgagacacattcatagagtagctcagcatccgcctgacttccagcctggtagattcccacgcccaggcaagccaacgataacggatcgggcaaaccccatggcgtaaatgaattaccaacattgttcaccccaatcactgcatccagatcatatttccggatcatctctaggacctgtagagtgcctctcggacgatcttgcggaggcttgcagtctccgctcgttctgggaggtgacgccatgtacatatcgcttgttggcagacccacgaagctgactgaaagttcattctcgtggatttcagttgccagtcggacccattcggtctccgtgagtagtgtcagtcgtgtacaatgaccaagcatgacacgcttgtctgttgagtggatagtccagcttcgttgtttgagggtctgtaagacatgccagaccagagcctctttctttgaatcgaggttgtaatcgagatgaaagtcgacgtgtttgttcagcttcaaggcacgatcaattgcccattcgatgttttgcttcgcagcctcagggctagattcgacatatggtgttgtcccaataacatcgatttgcgaatatttatgaagagcggtttccagaaattccatattttgctctccgtattcactagagaatataggatcttgtgcaaaacagacgatttggatatcgcaagaatctttccattggtttttcaaagcaacagcggcttctagacaaatcagctgcactgtatggtctacctccacaaatgctctcattgcagtaacacccgacgcaacggactcagcaagaagccactctcctcttctaatgatatcagaatggctgaattgttgtttggccttggtcgtggaggacaaagcctcctgaaatgtgccggctgtaggtagaaatggggcatattcaggtgcgctgtggataaaagctttgttaaggtgaatgtgagggtgtaccaacgctgggagggctagaggagactcgaaatcatccttagtagaggattcatgcggggtcacagaggtgactgtgcctcgaagagagtctctagggtatccaatctggatatcccaggtggacggctctcctgccagtcgaacaccacgaatataattaatctggctcgttagtcgtggcggagacatattcttgtgcaagtgaagtgttgtctgagttgaacgctttcccgaaatcccccgcagcgcgtggggtttacgggcttactgataacacaccgtggacttctttgaaatgacaatatattcaacaggcttaaaatggtagtctcgatgatcttcggcacatttaaacccacaaatatacatgcaaatgcgaatcaacaaaatactatatttacccaagtatagaccgagggactctctactaagctccccgaactaatactcgcactttctggcggattgtcttcaacatgctgacgactgtatccgcggtctcgcaatactgcgcccatggttcaacgcattgaattgcttccttcactagctcatcgaagtccggaacaaggggctctaaagccggcgtggttttcgcagtcgagagagtaaaaatggcagccaaaattctagatgtggaaagtaagtaaacttcgcctactggaccaccttggaccggaagatatgatcttacgcttgcattcgatgccagtttgagtgtgttctctgcatcataagaagcgatgccgcccagatgaatttgcgacagctatcaacgcacttcttgcaattcgcgaaaataaattctggcaatactgtactgccctggctgtgggcagcaaaaacaaggctcggacggcagatgatgtgttttgtggcatagtaccgggcgagaatgtaagtgtcgtaagggtgatctgcggatattgaattgcccagggttggcctgatggggtttgggagcgagccaaaccagtcctccaattgacgatcgagctcctcgctgattgtcttaagagatgtaatcgactgcttttggggagtcacactgggggtgtcacttgtgtgttggggcggagggctggtatggaaattagcctgatcgggttttgcatatagagcactgtgcacgcggttgagaagctttcgaatcgagcacatggcgaggaatacaagatggccgtttcggctatcttctgaaattcgaggaaagggcaatctatccacgaggacttcaataccactgggagggaaattaaattcggcgagatcgtcactgggcatagtttgttagctgaatgcaagataatgccagatagtatactaaccattcgagaatgaagcaggcccaagctatccgatagagactcgctcgctcttcgtgtgtgttcatgtcatgcagtctatatccaatccgtgtcaatatcctagcgggaaaatatatcagaaaagacactcactcagatatcatgatctgcacactaccagatgcttcacgaatcatttcccatgcttggattgggcgtcctatgtagcgcagatacaacgagccgtagaataaagctaaaggcaacaaatggtccgctgcaaaggacgttatcaatgggctgttcaagtagtgatatgcggaagcgaaatattccatcccactcaaatccttgtccgcttcaatatcaaaaatccgttgaggattcgtagagacctttccgagagccagaatcacgagataaagtgaagtttggatactgttgaccttggtgtacgttgagaaagtgtcaaaaagcatttgtaacagctgcggctcgacaatcgggaagaatgcatggacatgatggaggaactcggtgattagaggtttggtgacctgaggatgcagtcgggatacgtcgatttgttcaaaagcttgaggtatgcctgcggcctggatactgttgaatggtcgctttttctctatctgcttgaaaaagtcttgagggtagtcgccaaccaaatttttgactcgatccaacgcaaataggctcccggttggcgtatgatgaccgaaaggaatggtaaatgcatattcagagccgtaggtgttctccggtgaaaacaggccgaaggaggatttatcgtatacatgctccggtgatgggtcccagtcgtatttaggctgtgaggcatagatagaggaacttgaccgacccggatgatccgacgaagcgcctactcgggctgcgagctcggtgatggcgtccttctgttgctcgatcagggtttccagatgggtcaagcgaagcaggatttcagcggggatatcttgcaccctgtgaatcgtcactatctaggaacccttttcatcgaggtgacgctttctacctgtcgctttcttgatagacacactgagcccccgcatcggtgcagaggccacatgtcggcttctgcccatcgcacttccgtttcctagtatacgttagtgacggtccaaagcgaggaattaaaagcctaccgatgccgacagaaattacatgcgattgatgcacgcttccgtggatagtcgacgggagggcgagattcaaacgatttcatatttgctttgtgagcaatacggaagatcgacgtcaaatgctcactgcggggtcgtcagcaaacgccaaaacttagccccttaataatcaaacgtgcctagtttcatctgggcgccaaaaacaaaacgaagtgagaaattatattcatttaccgataagattttactcctgctagttgaagcaatcgatctgtgtgctctggcacttccagcggtatatatcgattgcgggggtcgaccttaccatctgggagatgcaccactccatcgcggatcactatgttctcatggggccaatgagttgttgctcggtaagaggcgaaagcttctttctttcgtttcaggctctcttccgtggctagctcaaagggggcgtaggatgcataaatcaccgttcggatcgtattgctgttgacggtgggttccccaccccaatgcaccgtacgtgaatcccacacgattaaatctcccggctccgcaagcaccttggatggtttcataccatgagactcaaaccactggatttcttccgcgctgaacaggcgcaggtccttctgctcccaggtggatggatcggtctcggtgtcgaagaactcctcggttactgtgtttgaccgcggaaacaccataagggatccatcctcgggacccgcatggcttaaattgataattccctgaatacagtggagcccgcgacgcattggcgactgatccacgtggggccatggtttttgagcaggcttgtcttctcggttgggcagagtgatgttcagcgcgtcaaacgagacgaggagctcatcggtaccccagatcttggaaaatgcctccagtacctttggctccatgcgagcatcccacatgaatttctcatgggtgactgaatatccattgaacgtattcactttgctttggaccggtaagttgtcattggtccacgtggaaggatcatcaaggtcgagggttgtgctgaaagatgtaagccagtccagagctttgcgctgatagtcctgggccttttttgggtcgatggcattcttaatgatcgcatagccttcattgtgaaggtcgtctctccaatcgccatatgggccacttagcctagcgtcctcaattagaaactgcctgctcaggagaaaatatagtcaactcactcaaacgaagactgattgagagatggagtagtggtagtgacagtggtcatggctgtttctccaaacagaacaagctttagtctgaacaggaatgtacaaaataacgggagcgtagctttaagtatgcgagattaatatcccaatgtgatacatcatcaatttaaagccagcacatgtggaaattcgcaatatgaagtccaatctgatggcctccttcggcgggtaagcgggtcgaccccgccaaagtcgcaagagcggaggtctcgcagacggtctaatcgccatcccacctcattctgagccaatcagccatgcaaatgaaatcaacagaaacgtcacgggttgggctcaaaagactccaaggatgacgtctcaaactatttctccacacaaatatgcctattatgtcgcggtcgctctatactcgggcccgctcaaggttgaaaaattctctaatcaaaggggtttgcccaggtgaacaaggccaaggtcaagtctcgaagcacttgcatatagaaatcgccagtaacacatcgaaataggccatgtagacggtttgcgctacaaatgcagcaaccaaaagaggcagtaaccaaaagaggcctcatgcagaagaaaacagatcccggatatattatccagtgggtcactaaccactactctcttttctgcttccatgccaatctaaatccaagccacgggacactgaaagctttctctagggtatattgcgagcagtgacccatctaatgcttacaaatctccagactcaaacacaggttcgttatgcttcacagacctgacactgcgttcttaagctcaagtatgtaggcttctgcctcttccatactcgttgggccgactacatcttgattcggtgcatccggcgagtttgctgaacctgtgaagtacacgattcataatcttcaatgtgatgttttgctgcctcgattgtaaggccactaatatcagcatctcgcaatttccgtctgcataaattggactccctccatctgaagaagaatgtccgctagctatcgcctctatccgagaagtcatggctctatgcaccaacagtacacgggaacgtatcctggctggtctcggctcttccacttcgactgtcgatttctcccagcgacccctgctgaatgtcagtgaccatccaaccgcccaacagcccccctcgaaacataagcacgcgtaatgtttggcccaggtgtggatgcgtggccgtggaattggcttcctcggcaagtgcttggctcctacctctgcttagccatgaggaattgcaaagactgtgtcagggcttggttttagactgtgagctgtcaatatattgctgaatccgtgtttggttgatggataatactcccttcatcaccaaggttgcaaatgccgaaatgagatgcaggcttgcagcgccaatatagaatagctcaagatggctggcaattgtcaacatcctccagcggaatctctctctttctcccgcataccagatatgattcattgttaccgtgtttctaaccttggcgcctgtccctcattggcatcggtcacgatataactcgtacagtgctgaacaatcccatatgtccaatgactggggtggtgtgctagttgaagagagggacgaacaggatgttcttccaaatctgattgtaatggcatttattcttgtatgccactacctgtatatcatatgatataggaccatcagggaaggtgcgatggagagtgtctattttgggaaggcacgtgggttgggaatataaaagggcccctccccccatttctcttcttctcttcttcctctctcctccacatctctctagccaccatctcaccgtagcccccacgagacagcgtcggcagaggatgccgtagcacatgctgcttcatctaccacagggaccatgacattaccatatgcacgaggtccatgtaggtctgcatcaaacatcaaactgggctttctcgtggacgttcctgaagtcgtggctctcattaccacttgacgagtcccacggaatacattaggggtgtaaatcttcgtagccgagactcgaaggtagtcacggcaatgaccgacgcttccaaccttacggtttcttttttgtgtatctaacagaccgacgatgaaggttgtaccattctccattgtttccccatgccactaccccagttgcactacccgtcgtcgcgccgtcgctcagctcggcgttactgttcttcccaacaccatcatcagtcgaagggtcgcgcatcttatcgatcaaaatctccatatagccacaactcggtcactctcactatgaatgcggaggatcgtgtgttgccagactctacctctgatcctattatcgattctatggagctggtgacttggaaagtgatagtctgctgggttggattgctattgctgtcaatactacataacccctgttaacatggctctctttttaggcccagcagcgaaagaaatgattgtgtacgctccagacctaacacctgcgctactgagactggcgacggcgcgtccaacaattagggccggcgagttcggggcgaacaacccattctctccatcccaattcccttccaaacagtctatatcgatttcgtcaccggcctgccagtctcccaccagagcttcaacccagtcgccttcattacatacaaattcacgaaacggctcagagcaatgaccggcaagaccacttggtcaagtaaggactgggccctggacgctcgcatacctacagatcgcagaactccttttctgtatctgcctcgacagtcggtgatgcgcacagtttccttccatgatccgggaacggtgccacacagagtatgattgatgccgtctctctggcagcttgtttgcagaatgctgggaaagagaatgtgccctgggcaactcgtgttcataacaagcttagatcggccactatctggcatggcaaagatatgtctaaggtaccatgacaagatactcatccatcaaaatcaacttgtgtgtacggagtacacgatcaatgaacgaatatgatacttgtatgatacatgtgagtataaggggtgttgctattcggaccgacctgcaaaccccggccagggtgacgatcgcggacttcggacttacagtgtaaactccgaaatcagccctagagtgccccgagcttattggacttaagatgcaagtcttaatggccacattccatggtcacgttgacggaagccgctatttcccagaccagtctttttggcattcttctaaaacaaggcacactgattgtattggggtcgcgttcccccagcagacggagccttacctccagctagagcgatacgtcaaccaaatatctccattaacgactcccctgccggaggccaacaagcgcgagacgagcccaaaagcaacacattatctcgagcctggaaaggaaagcaggacgtcaactttaacgaacagtccactaggacatcttcgatttgcacgacacgccgaaagtcagaagtacgagaatctttcgagtcgagcatatttttaaaggggcttgaatggaagctattattttgttcagtcacgaaataatctcaaaggaggacaaggcctgtaacgagactctgctgccgcaatttcagcgctgcaatgattgtatgtcccgtcccgtctttcgtctcagagtcggagcgatgtgggccgagtacgtgtcagaatatcaccactgtttgctgtcccctcgggtgtgagtctagttttggcatagatcgaccacatggctattgccgctatgccacctcgtaaatgttaacacaggtcacaagtaactagctaggtaggtatatacagataggctcaatatctatactgactgaatgatttaatgcgtattctaaactgtggacaatacaatctaacgttctttctctctactttgtagcacctgtgaacgaagttaattcgtatccgtgtcaggtggatcgggaaaaccaagcagaaaaagaagaaccaaacttacctaggaacttcttgatatcgccatatatggcgaattggcccgcagtgaggccaccaaccatgaacagacgcgtcgggagaccagcaaaagatccacgcagacccagctcaccagcaatcttgatcagccgagagacagtactctcaccaggcagacccttcgtcttgttgatcttagacaacatggtatcagcgggctgagacacgatggcagccgcgaaaccgctcagcagaccagatcccaaattcacagcggtcgaggcaccagctgacatttgagacttgtcaaattggctcaggatggcctctgaaatcttttcgaaagcgacgaacttggttattgtgtaaggaaccctatacatatgttagttgtagcttttcgtcatgttgttttcaccaaactataagggagtcttggatcgaatgaacgtactgcttgaaaaggataggaccaaagcccgagtaaagagcgccgacaccctcattcttcacgatcttcccgaaaccatcgatcagaccattagcaaagccgggtgtcgagacaaggcgaatacgtgttgcttccaggggacacagcgcaaccgaggcgaagaactcagcgcaaccagctgaaacaacgtaaacagcagtgttattctgcttggccttttccgcaccgagaacatcgatagatttctgctggaagaattcataaccgccgaatttgaaggcgccttgcatgaaatatcctgcaaaggtcggcccgaagcccgttgcaagaacgctgatgccttcattacggatgacctgtcggaaactaccaatcataccacggttgtaggtgagagggtcgagctggatccttgtcttaacactatgcggaaattcttcattttagtcgatgttggtgatggagctgaagctagagctggagtgagaagcaattgagagcacgtacacgtcgaccggagtaaaggcaccatgggtgacggagcagcccagtgcaccggcaagggcaaagcgagcatagaggttgatgccctccggcttgctattcgtgagctggggtgtggaaacaggagtggcagccattgtgatggtcgtgataatgaatgcgtggattaagcgaccagaagggtcttaggattatatataaaatgataatggcgggccacttgtccgcaagcctttgttatccctacctactgtctcgggtttaacgctattaaccccgttatttccagatgtccaatgctaagccgaccaccaatatcagttgcaaccttccttctcgcatacttgcagtaagatgacttgtttcttgttgtaactgatttttcacgcatcctttttctgttctctatctaggtacgcattatctcttcgcatttattaggtatctatcgtgctctgtactccgtaccctttataggtttagcgagacgtaaaccccgtctgattgcttcggcatagaggtatctacctcacaattttcatgccaatttcagttagcagatgtaggctgcggtaggccatgtcatcgaggcagccctgggggagtttcccaggcgctgggtcgcttctgcaaggttacgggccgtgccggtagacccgcagcagtgggtggggcagcccgatatcattgttgtcggtactcgagtttatggcaaatgcatatggccactatcaagtcaatagcaatccctcattttgagagagagagttcctttgcctcaaaccatttcatgtacttttcttttcccttcattatatatcccttcttcaacacttccattcacatcttccaactcattccgtcatctttggcctcgtctcactcttaaattacattcattgattgctatatattgggatcacttgaccttgtctatcaagactaccatatcttcctttctacctgtctatggtattgctcgctctttctttatcactatgatatgaacagaattccatgctgtcacaagcttagcttagtcatagcttcgtagcttccagcacccccaccaaggaggtcaagcttactgctacatttctggtagcaggtccaaccacggtagtcagcgacaacgccagaccaccacacaagccgaggcgcaacctaacaacgcaatcagcatcagctcttccttaccgtcttctttaccgggcactcctgaggcacaaagccaagttcacggagcggtagcgcaaaaccaggttcaccaagccgatagcgagggaaaaatcccccgggattttgtcgtcccctacaaaagcattatggaaaacctggaccgcatagggccagaaatcgacgatttgagacggctatacaagcacatgtctacatactgccagctccaacttcaatagactgccctaacggaaaaaattgaagccgttgccgccgccacacgcattacaatctctaaagagctcaacaagctgcccgatattcaggaccgagctatggaatgctgggaacaccttttccacctgcctttcaaagctggaactccgcattttccctcccaagctgaaaccccgcaagactataaagatcaagatgagatagcgtcagtcatcaaggagaagtcaccacaagcctcagcggaaacttctagattgctcaaaactatcaaattacagttccatattaatcaggactcagcaagcatgaaattacttattggcaatgtactacgagaatcagagtggagacgattcaagtaacctactcggaatccctagtttctgccttgaggcttgaagaatcagtacatattacatgcaaaacctatttttcttcaatagatgatacgttaatctctatgctctcatctttattcaattttgtttgttattccctcaatacttgcttgctttagctacacttccatcttcgtctgcaatgacccaactactcactggcttctcatgtttgaatctgattgaggctattgcagctattgaccctattgacaataatattgtataaaatcactttcacctctcatgtacctccatttttatcagctcgctcatttattgttcaattgcaatatcttcctcgagacaccatgcctattcataatgtggccattcaatcgaagaactgtataaattccatgaagctcctgaccaacctatttttttcttcttctctatcatcaacgatgaccccaactcgctctcgacgaactattcgcccgcactggccgcctggcatcaccaagaaaaacgccgctcagcgaatcttcaacataccagagctggtctctgagactgtccactggcaggtccagggacttgacgacttcatgtacaaagtcgcggggcatcgggggaaagaagcagtgggtgtggctagcgaaattccggccatggaaaattggcctgggtgccaagtgggagccctatgtggagggccaggcgggttatctctatagatttgcgactcttaaccgagcgttgtatacaaagataatccaacgtcaacgaacctggaaaaacactatgggtgcgatggatacgccggccgtgtctcgctcactagacgtgatcttcgcgaaggtcccggccggattccgcccaacagtacgctaaccatgtcaagctggcctcgttggtcaccgtcaacaccggggatgtccgtgttgctgacgccgcgctgagggatgttcgtttcccgaagctgcgggtattgaaattgtgcgttcgagggagcagtcgcgattctgacattcggacccttatgggtcgccttaatatcccacgaatctagggcgaattagtcactgtcctctccctcagcagctatggcagaagggagccagaatggagatggcctctccacggattgcccgaagattgggcaaaattgttcagacggatctcggtatgcttctgccaccgctgttacgataaaccgctttgtactgattctttatcataggttctctttctaaatctcgagaaagtcgagatcggacacaacgtccttgtcgccgataaggttgtcaagaacttcgctcgtcggtacccagcccctaaggacccttgagcggcgctcactcgagcgttcaattatggcctttgacctcttcggcgaggcttcttgagtctgagatcgctgcgcttggggctttccgagggtgcgttgcaacgacccttgctccggcaaataattgtggaattaggggaggatggatagggacacaattatatggtataaggtccctaaccaggttgaggacagtctcgagcatgaagcaattgatggctttacctacaaagggagctgacgcgatatgaggacctcatattcgtttaattgctggcttccctggtcttggaaagcacgctcttctgcaaactgtggatgccgtctgagtaaatagactcgtccaacacaaactcgagccacaaattctgacgggagaaacgatgaatgtttcgattgagccagtcgcggggttcaggagaaacccccaacaccgtcccgagcagccacctgcattcttcgctgagtctcattttacaccatcggctactccgcaatcactctcatcgagtgatccagctttctcctattcaagctgtcatggagttgacagagtgctgattgatttcaaattataatcagccgagatcagacaagaacaaaagcggcttattgacaagcaatctgcgaatacggacctcatctaccccgtcgctaagtacccggatctatgaacatcttcgtggcgatttgatgacctttctttcccctgagctaccagtgtaccacatttgttcgaactgaactggcatgtaacaatcttcacgggaactaagtagtaagaggacctttcttcaagtcattgcaccgttgataaccggcagtgtcatccgtatagccctgcacacctaggctacattcaatatagcttagtctgaatggaccatactcccactttttctatccagaatatctaataaaattcaatttacaaataagagggacataaaccccatagagaggagatatccccacatgtagtatatatacttttccaacgccgagtagcacaggatataacctgctttagctctaaagtgaaacacctcaaacccaggcctagggataaaaaaccaacaccgctctttggtatgccaaactcctttgtatcatgacgccagaatgcgaaggacaaccgtcttaaatctcctgcgagtccaacgcccacacctcccaatgctgtagaacctcccatcctacccgtcgcgcgcgccgtttccacacaaagccatcatcagtaaaggtgtgcgggtagcagccgtagaccggaacaccctcgttgtcttcggctctgttgggtgtcctcgggcagggtggcggtctgtgagtttcgcagccatctagatcgcgtgatcgtttccctaatgttgatggcggtaggattggtcttgtgccgggtgacttcgaccaagaagagatatgtgttgtttgtgtatcgggcgacttatgggagacggcaggctgatacggtgcgctgggtccaatgccgtcggtaccttgcgtgggagcggaactgtctgtggtggtctctggggatgcattatcaccgtttggtgtttgagactctttattggttcctaatggtattggggctttgtagaagtccttcaactcccaggctttccagcccatgctgataatcttcacgtttccgtaaacttgcttgttggcaaggtcgtagctcaacatttcggtcaggatcgagtcgtcgatgtccaccacttctgcaaaagtcttggcattcgcgaaagtttcttgcaccattttaatgctatcaaatcgggcagatgggtatatcttcagtgcagaagttgcaggaccacctgacgcctgcccggtaggtgggggtatgagaagccggatcgctttcaacttccggaggaaaggtattagtagacccaatgagtccatactagaaaactcggtggcaagggcaagctgctccaaattcggacagctatggacgagtcgcgcgaccatcccggtggagagaggccatttagatggaagaaggagatggcgcaatgtcgcgccgtgatttgtggtaatatttgagaggtagatgtctcgcatactagctatagcattaagctggctagctggagaagcagaagtaataggggagttggctgtggttccgccgggcgcaccagacgaatgatgttcggatactggcggtgtgagcgccgatgagaccacccctcctccgggccgtgggcaattgaggatgtcgcttgattcggatgtgacattgacaaagtatagccgttcgagtccagagaaattcccaatgaactccgcgctccgctttgacactgcatccatccggatggatttcatgcggagcttggcatgaggcgggactgtcggccagctgttctcgacgaatgtgttgaccagacttgagccatcaaggccactgagaaatgtgacgtcttcgacagtagtcggatcaaaagcccagttgaactcttcggtgtggaaggcatatagattctggaacgtcatcttcttaaccgccagtggctgcttgcttgcgatcagcttgcggaagtaatcatgcagagagacactaggctcgtgtgcatcgcgcatccgtggcgaccaatgtagtttcaattcgcgcagtttcctactcttataaagaagagtcgagatatcatcggggtagcatagcgggtcgatatcggtgattttgagacatcgcaaatgcggcatgccgggaatgacgaaagtgggttgtgggtgacgactggacgggaaccggatagtcagagacgtgagcttcggcagctgtgtcaaccccagaaaaaccgtgtcgagcattttggtgttcaattcccaatggaagctttccaaattagtcatgcgatctatggcagcgcgtgcggcgatgttcagcaacatcgatgcgtcgggcacccggccgacttgggcatgctcctccagctcgtattccttccattcaccccgtagtgtcatcgatcgtaccagcgtcgcataagatcgtgtaataatggcattcaatcccatcgtgaagggactagcgctcccgattccttctggttgttcgtcgcgataacggattttgtcgtaggaggtcagcgtcaggctgcggtacagctgtggcagcgccatataattgaggactcgacatgttcgacatagccgggcgagatcgcctgtgtcgtcgacctaacaacagcatgtcagatatggaaatgagatgtgcggagttatctctcacatgtgacacaatctccgcaatgaggttcaacggcagagccatcaactgggcaccgccaggcggttcagttatgctcgctccgaacatgtttcgattgacggtcgccatgatgcgacgtccaaggtaaggtgtcacatagagatacaaagaatgcagggaaatgcaccggaatcgcgagttcccgagtgaaatttcgtctccactttcgtaagccagcccttggtcagccagcagccaagcagagatcagcgatagtcaccactaccaccactacaagcctgtagagagtatcaactatgagaggactaagtatggatgcaatattatattcaatttcaaaattataatgggtatctttctaagatgtcgaacggaatcctcccaacaccttgccgataatatcaaatccataaactccgtgaaatggccaaatataactgcctagaacaccaagaaatcgtcccgggcctagctcctcagcctccattcggcccctgaatccgtcggccacacgcgatgccgtaaaatggcgttttatggagaactttggccatgctggccgtttgaaggcccgtgcacaagggactcggatgtcccagtctgttccgctgacacatcgttcctttcttccgagtaactcgtatctgtccagctttgttggtcgtaatttgtgacaagttcacgatccaaatggctgatatcctcgttgatcagcgccgcagcttctgggtcgtagtgtaggacatagtctccacctcctcgctctacatctgcctccgtccatggagcagacgcttctggtcgagaaggaatcacccgcacaggcagattgggacgagtggagggcgctccgtgatgttgaggttctatcggccggctctctcccggtggctgggtgtcctccagcaggcggttttgcggggaccatgtgtgctggccgcggcgacgcgctggaataacagtgactggtaatgagccgtcggtgttttgtggtccagcgcctggtcgggctttgcgatggagagaaaagaagagatcggctcgagaccgggcagcttttgcttctgcctcggcctcttctgctgcagcagatggtctgtgttctgagaattcttcctcggcttgtgcatacgccacttctttgggcagagatgcacgtcgcctcttgaatgggtgcaggagaacatgccatcgtggatcggcttgcacgatctgcggggattgttctcgggtattttgaacggaaagagcttgattatggatacccggagtatgtggctccctgccttcgagttccttggcttcgtccatttcctcctcctcgtgcatatttggcattgcgaccggaggcgtagggctagccactggatgatatcggacattgtacactgtgcttgctgcactggtagtatcagcacggctgatcggtgtgatcgccgctgggggtggagtaggccggtgaccgtttgggccccgcggcgccgacgcagcggcttggctatatggtggtgctctggctcttttgtttcgattgccaagaggcaatccagcccgagcccgtagaggtcgatgggctaaacccatcacgccgccccatcctgacgatgcgccattgccgccaccttggtcgtgtccttgtggggagaatcgcggccagtcaacttcctcggatggagtgacttcaagcatttcatcgccatcaaaaacctctcgtccaagaatcccatccttggtttcatctcgttccagcgcttcaatacgttctacccattcccagaccaccacactggccgctgcagagccaacccatcgaatataggtaccccagccagcaacttcaggcttggcaatatccaaaacaaaaaagacaacaggtatcaaaatggcgcatagcgagagaagagccactaagcagatattccgcatcttggggtggaaaaatgcgtatcggtgcttggatatcgagtagaaaatcacccaagcggcatagagaaggttaagcgacaattcgaacaagtagctcagagcaggaatggcatcctcgtatagcctgggtcgtgtcggagcgttcctcgcccaaaaattgtccaaaatactaaaagtcgtatccagcacaatcaacgcaaacccagcccatttgatcataactttttccttatgtcgcgggaacaatcgaatcaacgtctgaacctgcgcaagccacagaaatgtactcgatatgacgcgcacgatgcgaatttccatgccgtcgataacctcctgggaaagcgcctcggcatcggaaaacccatagttatactgccgctcggcgactcggaaagaatccaccgtggcgatagtcagcgagatcgcaaccaagatcgcagccactttctgtagccacggtcgtccgccgactccaaccaccgacgagttcccgctatatgagccgctgatcatcccatggcggccgaggaagttggcgccgccgccggggccgccgacgtaaaacgtgcgtggcgtgatgagaaggattatgacgaggagatagctcacgacagtcgcacaaccgatggcatatagctgtggggtaatggaggaataaaatggatcgcgcgtatcgagaacggcggagatgtgaacctcatcggttggggagccagtgcagacaggctcgaagacggcattttcactgagggtaatagcgaatgacttattaagataaacgagtcctataaagaattcgcacctcgtaattagatatgattctagaaggggcgttccaaacaccaagtctgcgaccggcaaactgcagcctgcggcccaaggaccaaagtgtcgatgaagataggagattacataccattgataggcaagacgacaggcgtacagcccggcgtataaaccttcgtcgtagtcggtgttggattcgcccagatctggcggggaagcaagtggaagtcattttccatgatgtgactcgatgtgaacggcctcgaatcgccgtcacaggaaacagttcataaaccgcgcaatttccaccgatacgcccttgtcgtagacccttcactggttaaactcccattattgactctgatcgcgtacagacggtgcgaatccaaaatccggggggggggcgattctggaagggaactggagaaacagcaacggcggtgtgagagtcgggggacacgagacgagcaatgttttctttctgtcctactccgagaaaagaatgaaggtcgtaagatcataaaggagataaatctacaaggagacaaggaattaaggaattaaggtgaaagtctggatgctccgcccatttctcggctccgcattggctcctccacaaattcctcacgcttatcgccacaccgttgatgttgggtctactccgtacactcttctatatctcacggtttcaccaatatatgcatgcccattgtattgatatgtataagcttagctgagtcaagggccaaatttcactatgttgactgatcgaatccaacatatctatcatccatgtatcacatcgctcttcgctgtacaacattatcacacataagaatcgccgatattccatgggtaccatctcatcaagagatttattccatttatgcctgggcagcgaagccaagacgaggtccctcggagtcgaaaacgacgtactggctcttgaggaagatatcaccgaagatggagaagccaatgccagagttgctctggataccaccgtagcagctggagctaccggtagagacaggtgcgaagttgatgtacttgccgggaacaacggcatcgtagccattgatggtcacagtgaagtcaggcagagtggcgctgcaagggaagatataaccaccagcagagctgctgttctgggagccggtaaccttcttgtagtaggcggtgacaatagagctatcgagcaggaggagagtggtaccggtatctatacaattcaagagattagtcatggtaaacaaagcatggatgtccacaagggagaatgtaactcaccagcaattccggtaatagacttgccagcagcaccagtgccgatcttgtagctgtcggcagtgaaggaccagaaaccatcggagtcatcaacgtcggcgtaggccaaagttccggtgtacttatccgagtcgatgtagccgaagtcgtaggtgccaggggcgccgtgcttgagagtcacggcgaacagaggctcgccaaggctagacttgacggtgtcgaagaaggtcttctggggggtagggctgacggtgttgatggagctgaaagccagacccagcagaccatcgttgttcttgtcctgcaggaactgcgagctgatcttcttggcagcctcaacagcttggccagtggccttgactccaccaacagtgacggtgtccttgtagacatcaccgctagcactgctgccatcgccgtatgaaatggaccagctagcaccggacagcttagtgccggagctgccaacgttgtagacgtcgtggccggactgctgcgaagaggtaagctcgctagagaagacccagctatatgaattgtcagttgttgcccttgctagtcatgccatatcaaccaacttacaggtcagcagagccagtgtcgaagtccaagttcaaggtagagctgccaatggtgactggagtgagatactcaacgtcgtcggcctcgggcgtggtaatggcggaaccgctcacggcagcagcgtgaactgtggccggcacagtagcaccatacttgaccagtgcattggcgtacagaccaggcaagttgacagtcctggtaccgggaacagccttctgcacctggttcacagtgaagcccttgcgggggctcttgaccggcacagccgcagctgaagcaatggccgagaagcaggtgagagcgacggtaacttggctgaagacaaccatcgtgatagttctatagaagaatgaatagatctattgtgaacgaagacgatgctggagaggatggatttcataaagagatggaggcaagacctcctttatagctttcctgatggatgaaatccgccggcgtccgagtagaaggcatcaacggggctgtctatcgcaacatccaggacaaggtgataatacccttgtaggaaggaaacatgacgatcctgcagaatccagtcaagtcgaagagaaacttcgagatcgtcacggataccatcggccatccaggagcacgacggagtccgccaagtaggcgattgaggggtcaagccaaaaagggacatagtgccagggtctcaagaagctaagatggtatcaaatggacgtaagaggattagcgcggccagcgcacaggggcgggagatgtatgagatgcaacacaagcaaaatgcccagggagcttggttgtaacaagctatctaagcagaacggagaagtccggccaggccaaggcgttgtcttgagagactgcgtctggatacatcattgggtgaagactggtcgatcgccatacttggccatccttgtgtaagaggacaataggttgccattggctcaagccgatagccagactacttggattgtctttcggctatgttgtagtcacgctgcatcgagggattgttcagagacgctggagactagagccctgacgatcatcgcccgttatctccacgacagccaatcacctgcgcgaaaggccaaaactaggtcacatcgctccattagggtaatttggcctcattggatgagagacattctgcgtatgagccttttgggtttaacctagtgcctagtaaggccatactagctctcaatgaaacaagaacagttataatctccgacggggatccgtccctgcattgtatgctccaccaatccttatacagaacatcaacatggggtccacgatgccagaccgatgtgacccttcacggagagagaccaaatagcggctcttatctgcatcgaaggcatcgaaggatctagcggccgtcgagatggcgatctgctcatgggatcggcgagtaagatagtagaccctacgtactcggcagggataattgagtgccgtgcatgccatcaatcgcattgtttgtagtctatgaggtgactcttatggtaatgtattactctcgacctgactgtaatgaaatacggcaatagttactatatttacattgttctcaagcttaacccatctcgtatcaccattataaggccaaagccacccgaaagcttcaacctccgcggcccaagaaacttttaaaatatcatgtgaaagtcaggagaataaaagtacttgatttctgcatgaaactagagaccccgcaatcgaataaccccccgacggacaccgccggggaggtatagggattcgcaataatcaatgatgggctgcagtaatagcaccatcggcagaagaatcggttgatgcaaattacggcaaatggtgtagacaagaaataagaaacgccgggtggaaaactcaggggtatataatttcaagcaaaataatagaaaaaggtacagaccatgagctagatcccgaaaaagactcccatattaaagtgtaagactaaaaagaataccaaattgttcgtcatcatcattattttcatcacaggtactgggacgataacccggccccagtctcaccctcgccgttggtgtttccatcatacccctcattgaggagtacctcgagcatgtcaaactcgccaagcatgggtcccgtcccaccaaggccctggtcaacaattccggtggagctgttgaagaattgatcaagaggcaaggcaaaccaatccggaagcgcgccggaggtagagtggtggctgtcccccataggctgtgatgaggggacatggtttggcgatgatcggtccatatcattggcagggaatgtcgagctggattcgtagtagttgtggtacacggacggcggaggcggcatgaaggatacgttgaggttggatgagttgatcggctgggcaggaatgttcgccagtgggtcatttcctgacaccatcggggggccggtgccaggagtatccacatatcctaggcccgacccgcctgacgtcgtatcatgaccctggttagcggaccagggtgtattcgggccctcacgacgagtcgttgagtgatcgcgcgatggtgaatgaggccgagagcctgagactgaggtacgatcatgtccgtctccgtctgcgccgcggtcatgcggtgcaaagcgcagaaagcgcgtccgaatgctgctagtgagaagctcgagaagccgggctaccgtgttgctgaggtgcacgtcatccacaacataattgcgcagtgcctctaccgtccggtcctgcaggtctagagagactcgcacgtcgtcttctctggcacctagagtgaaagtctatggtcaagattagtattatgcttgccggggtttccactagagaccataccttcaagatgaagatcattccagacaagattcggaaaaacgttcgaatgggtgcgtgtctgagacgaccttcagggacaaggccttccaatactgtttgcaggattttgcgcgacgaatcaatgacttcctggatataatgctcattaacacggtagagctcgttcaacgtttggaaccagctgctgctgctgttagacggccccgatcctggttggccattctgggtctggttatgagtctgggtggattcgttggacatggtagtccatcgatcaacgaccgcttgtagagcgagggaatttatatagagacctgcttccatgtcagctgttatccttcaacgaatcaggctgtcaacttacgggtgtactcgagctcaatcagcaaaacgctccgcattgctggtgagacttctttctgttagctttcttatccatattcaacggccaattgacttacgagtcacactgtccagctgctgctggaaatctcgtagataaggttggaagcggtcgatctgctcacgatatctcccactcctgatcagatccatcgtctggtcactagatgcaaacagcaaatgattggcttgatagacaattttcgaaatgctaatccagcaatcctgcatccgatcaagattggcatcagcatcatttgcatcagcggatgtcggcgtgatatcctgcccccattgaggcaatgggagcatagaggggatcccaagacgtccactactatgcgtaataaacacaagaatcaaacgccgtagtcgacgtttccgtgtttgctcggatagcgactcattagccgccttggcatctcccttcgggtcgaagacaccaagttcaaaagctagagcttgcgccgtactcagtagcatccatgacatccgatccgatcgccaggccggttccagccatttttgaaacgcgacccttccctctgagcctttgctattattctcgccgtcgttgtcctggtggtcggcctgactgtatatctggggatctgtatccaaaagagaattttcatcgtcgcccggtggaaagtgtaggtttcgtgggtgccactctgtaagaagaagcatagcttctatagtgcccagcgacctcaattgcccacccatactacctttgcttgacgttgatgaactcgaatcaagtgatcgagatcggccaatgcccgaggtcccagcgtcaaatttctcttggccccagaataggcgttctaccatgctgcgtagatatgcccagagacgatcatggatatagaatgcccgcgtattggcaccctcacccttgggtttcagatgcctagatgcgatagtgagaattgtaaccgccagcactggctcatcggtaagcaacgtgcggtgtgtagaaggatgagaaaaatcagggattacaacagggctcatcggcgcgaggtgttcatagtaatacgccacatagtccatgccttcctccactgtaagccaaccggcacggacgaatcgcaatcgtgaccaggctcggattgcgtccagatatgtcggctctgggggagggttgttgactgggctttccctttgggggccgggatccgcgatctggggatctaccggccctgaagcaccacccgggtagtatgttgacccgcccatagacattcctgatcgaggtgtccgcacaaaggacccacccaaacttcgaggtgaactaccttgtggtagaggtgaaggccccgagttaaaggacgagacagactgtcgtgcagcaagccgattttcgaggctctggcggttgagatcctctgtcctgcctgcagcttcagagagaagatgcagagcgtcgtgggtgtttgtaattgccggtgacagcaactctactgctgtgcgattcatcatcggaggccctccatagctaggtggtgcaggccgttcgatgccaggatatataggaggtcgtgttgttggcacactgggcatgtaacgcggagttggaggtgctggaggcgcatgtggcgcatgaagtgcatgaggtgcagaaggtgcctcggaccatctctgttgggcaagcacggcttcacggtcgaactgaggtgtatcggaaggcgcaaatggcggaccttgactttcattcttggccacctccccaatcatcattcgcttgtcgcgatggaggattgccgctgcctccaattcatcttcctcggcatcggaggtcttgcgctttcgacgcgttgccgaaaattcacatcgtttactttcgcgacgacatcgaacacagggtggggggcgaggattatcgacacctattttttttgtggtcagtccgaccgcagaatgaaaaggaatgggagtccatacttcctagatcacacttgaccttgcgtttgcgacatggatcacaagcctgatatcctcggcgatggtgtgcatcagactccgccttgctgtacacactattattgtcccccatttcgtggatcgcaatcatggggaaggctccgacacaaagcgatggaaagcgagaataagccttaaaaaggcggtgggggtgttcttactccgacgactcggactaaaacagtgggcacagagtcttggaaagacaatagaagatgaaattgcacttgaaattgccaaaggagatctcttggtcgaaatatcaattgaagtcagagtttgctcgcagtcactggacctggtagtttccattgtataatgagaactctgcggggtaagacacggaattccagaataccacctacatatgtacagatatatatatgcacatgtacatctcattactttgaaaagtagatcctattctaattcagaaatgcgacaattcaaccccgacgttcaagatgtaaatgcacaatgcttctaaaccgagaagaaaaaggagcaggggaatgccacaggctaaagttggtggcaattccacttgaacggtatattcaaccctccacaattcattctctgttctctgtactagaaaaaaaaacctgtctatttcacccgctgtgaggcgaggctaacgttcatccgggacattgactcccaagctttgcgtggcggcaccagctcaccagatgcaccactgtccacgctgccacgacgtgagagatcaggcggggaccgcccagcaacgagagctctaacaccaccagcttttcgggcggggatcaccgagtcgccagaagtaagaacgtaaagaaggtacttgagattcggaagagtgtgtcggatatccaagacgcgcagtccttgtttgatgaggatgtattcaatgtctttgttgagcaagaagaccgcgtactcgaatcgatactggacactcaccggatagagggggtaggtgcgctgtgggagtgatgcagagatggggtcttgtatgaatgatgttgacccgttcgcgttgatcgagtatgggagatgcaccgacagatagaatgagagcagatagaccaagtgagctgtgtgtcccaatgccgctgcgactacctcacggtcgatatcctcgaaagtcgagtttgggagggccagcccggcgatggtaaatgccaagggttcatcggggatgggctcaatggggtagatcgtgagaagatcttcagcaatacgtcggacctggcccttggtatcctccccattttgctcgagcaattgctcgctggaaactaacctctcctgagcctcgggaagatgaccgcgtgtcttttcctgagtactacggccttgttccatcgcttcttttcgggctttgatactggcaatgagctcttctttgcgcctgactgcggtgcggactcgtttgcgctccatggcgacataatgcttggtaagagcaagcttttcctgtgccgcagctgcatcactcgctacattcaatgagcgctcattctgctgtaggattgagctaatctgagcctccaatttttccctggttgccagtgcatcctgtacacattcgtccaaattggccaatctcatcaaagcgtcataggacgaggatggtaagacagtaccctctgcagtggccctctgtcctgcagcttggagcgatgtttcgaccggcggaaggtcagtgagattggaatagacaccgtctgggaagtgaaaaaggatcgagttcgcaggaagtggttggtggaagctctccaatgttttccccaaaaactgcagcgatcgcaaatgcaactgtagttcaactaatagaataaacccagacatgtccccggtctttgcccagagtctcagagtcaattcgtccattcgagagatatatgggccacacagattcaagtcgaaaaatcggaaactcggattgtttgcacggtcgaccgtctcgctaatatagaccggcttgttaagaccatcacaatgaagtgagaagaatgtgtccgccatacggctattggtgatatcttcgagtctgacctgccgaatttgaggattggggtcgttccagaacagggtacttctgcgacgcatagaaggcatcgcaggctcctttgcattgtcatgttgactggaatgcgacttgagatcagtgaaggatcgagagggttgcaaagtgcggtttgtgctctgcgataggatcttcgacggcgtctttaaggtatttgggatatcgtcgtcatcaatggttttgccgtgagctcgagccgggggaggcgtcacaactaagttgcgtatagagattccctggagatgccgaagcctacggttctaatagtttgtcaggatctagcaccgacgtgttctcttccattctccatacatacccatgcatagagccatggcctctctctgcgggcacctatatcctgctccgtgtcctcatccataacgccagcgctgcgggagagcgcggtggtttaagtagtgcgttgctaataaatcaagtcactcatattaaagacaacagtaacaggcaaattgcagtttgaagcaattgaattggcgaaagagagaatagtgagctgataagagatgatgcggagagcaagcgccaagacctcagcgttccccgtcaaaaaatcgacctcccgtctctctcgatcaacaccgtctggcgcctcccaccaatgcaataaagccgcacttctcactgccccgattcttcccagatcgactgtacgcagcctccggttcggccgcaatggcctccaacgcaaagtctttccaaaaggtgctggatgcaacagcacttgcggccacgaaattcatccgccggccaccgattgatccgaaattaccaattcaaggaaagccccgagtaccgggctcaaatgcattcaaagatcaccaggaaaaggagggtcgacggttacagaaggccttgaattccgtcagccacggcaagaacatcttcgtgtacaacaacatccgcacgaaacaggttgtatactcattgactcgctacctggaggtgagtttcttttcccctactggcacgggctttgaaagctccggtctctcgcgaaaccctctatgctgtcctatccttccagtccgccgtatcgcaattttctaacttttgggacctttagaaaaacaacctcctcaagcaatgtgtcaaccacggcaaaaagaccattcccgccacagtccgcaaggatatgtgggtgccatacttctctgtgcacttcaacgaggcacaagtcggactgaacgtctataaccacctgcggcaattcgcgttgctgcgccagctctccccgcccaaggaaatgatcaccgtgacacaagaatatctcgattcgaagcggccggtagacctaagggaccagaagcaatgggacaaggaaaacatgggaagagtgggccagatcatgatgaagaaggagcgtgcttacgccctgatgaaccagaaggccaccgcgattgccgacattgctttcgttctgcagaagcaccgagaccatatcgtggagggtgtgccggagagctccaagtccggatacaagactctcaaggcccgtaggcgcagacgtgcggctctcctgcaggaggccgcgcaggctaaggaacgtgcgggtgaggttgcatcgctcgaggagcagctgcaggttcagattagcgcggaccacaacgcgccacaggagaagtctgttaagatcttgtggcaggatacgtacgatgcgcagtttgcgaagaactggcccgattacattgagcacggtcagctgcgctggactcgtaaccacatgattggccaggaggaccttccagtccctagcgaggacatcatcgccgatggttcgtttgagcaggcgtagacgtttggtgtcattgacgttcttcttctctcctgtccgtcgcagaccaagacgagacgttttgtgtgtgttgatatccatttccctctggctttggtctgatggttggtgctttttgtattttctctcttgtctctctgtctagcttatcctagcatccataaattgtacttttagatatatcaaatcacaagaagatatggccaccttccaagtgctgtcttcttttgacatcttttctagcgtcctgttaagtgcgatctctttcgtttttttctttgtatcatcttcgttctctagatgaacggtggaaaagatattataatgcacaaggcctcaagtttaaacgactaactagggcgttctaaatcaaaatccttttcgttcatagcaaatcaaccgactgtctatcctaatgtccatcgcatcattgctgatcataccctacaccagcagcggatacaacagacaggtaccatgtcttcggtttaaagaatcatttgatggaaaacaaaagagcctaatctcatagcggccaaattcaggacaaatatcctaataatagaaggaatagaaagacttatgctaacaaaagacatcaagaccaccaagtctgatctcgtaataaacaaaaggttgaaaaatgaagacaacgggcaaccagtgtgcaccattgacgccaatgtgcaatgtaataagtaagcgacaggaagggaaactccagaagatattccgggttgggtacattgctcccagaagcaccagatgtagatagcagacgaaaagaaagaaatggacacgttctatcaattcgtttcacagcttcagaatggtgtttcggcttcataacatgtcgtaaaatcactgagtcgagccggacgggttgtccgggcttctattcggactcagaatgtccacagagggaaggtcgttattctctttagatgacgtctcgggcccggggtcttgtttgtcattgctgttggccattctctgaagaacctcttcattggccttctctgccgctgcgggattatctgcaagaccggaagccacgaggcttttctgtgctttctcgacaatcttatcggcctcactcacgcccccagccacctttgtatgcgggtccccgtccacgcctatcaattccgcattgttgttgacaatgtccttgacacggttggagtcgaggcgaatcaccatgcaagacaggttgtcggtgctgaaccgtgcaagggcgtggtcaacaagaatctttgaggcatgttgagcatcttgaacgttccggattagatcgacagattcctgatcactgcagacgtcccatagctattgaattataattagctttcttgtatcatcaactttgtgaatagatttcaacttacaccatcgcaggccaagatgataaactcatcggaatctggctggataaccgtctctgtcgtgtagggatgcccagtcacaaggtctttcaaatatgcatcgcccaaggcacgggtgacggccagaactccattcacacggttgttcaggattagcccgccagcgttggcaactcttctcccttcattctcatcgctacccttatggtcataggacaaacgaagtgctttcccattacgacataatacaatgcgtgcatcgccaacgttggctgtgtacaatacccgttgccgaatagccttgtcctgcaacttcgggagcacaccagagacgcccggagtagcttgagtcggggtttcgacattctctgaattcgcatccgctttcgtcgccgcggcagccgccgtgccaatggcagaagaaccggtggccgactgtgagttgggtacacgatcttcccaccgaagcacggcagtgacggctgtgcacccagagtttttgacaggcaatttctccaactgctggtccacactggtgaaagtctgatcaagaagctctggaacgggagtgcctgggcttttgcgcatgacatcctcaagaatcaaatgcaacttctttccacaccactctgcggcaaaggtgccggcatgcccatcgaaaatcgcaaaatagccattgtctgtttctacaacggtagatgaatcctctgatgactgtgacacgctagtcttgggggaactagcaccatttagctctggtgcagttggggcaggggtgcctaggaaattgtagagataggcatgcgtatcttccattgtccggcgacatttgcgattacggtcttcggtaacaccaacgcggaaggatgaccgagcagtcggcgcagattcaccggcggagttattgaacgacccttgagggacgctgagggccgggtccatctttccaagcttctgtagtgggctttccgcaatcgagggactggtgctgatcgcagaactatcccggccgttcaagttcagggaacttttggcgctattgaagaaatttgccgctttggtaacggtactactcctgcgcttcttctcgccagtggtaccctgttcttcactttgtcgacggttgaaaaacccagcgctgggcggagagaatctcttatctcgtggactggtaccgattgaatcggtttggagggtcaaggagttggggtcgaggccagcctctgggagtgcgtctactttatctttaggtgggctcgaggagccactgaacattctgctcagtaacccaccctgcgaagaaaaactgcggcgcttatttcctgccagcttgattgtatcccttcaagaggaattggtggatcgggatggtggtttagtgatgggcggggcgagcacggagggggcgctgcgaggctgacgtaggagtcggtcggtcgaggccgaaataggaagaattgggctgtaagtgctaaataaatcagcaacgagtatttttgggagcgaagagatgtctgaaatgaaagacaatgaggcgcaaatataaagaggaagatggtttaggcagtgagcggcacagacatgcaatgggggggggggggcgcatagtaggatcacgaggggaggtgttgtctcttccaacacataaaatatgaaacacaagtaagagaaacaagaccaatcagagcaattcagagtatatgaaacccatcaatcctccgagcaaggtacaatgtacatatttgcaccattggtcaatgtatagcgcgtctaatgatccgaccacatccccaacccaggcagatatgaaactcggtatcaaatgaaatcgagaaaaggaagcaacttacaagtcaggattgagagaatgggattgtgagtagaggatgaaaggtgaaaggtggaagaaggtgaaagaggaaaaccacctaaatgacctccgctgacggctcacacggcactgggcggagagagccaagactgccggggtggaaatggatcttagatctgatatatggggtatctcgtggatctgatatatttcatatacttgatttcagaggcatattggagtgtatacgaggtccgttgcgaattcatcgtacgcatgtttatgacacctctccgcctttggtcgatgacgctatgatcttgtttcttgttatcttgccactgtcatactcatgcacgacataggtagatctagatttaaacagctaacctcgcaaactccaatgtacctgcatcgtccgcttcattgtggataggttgctcactttcatcagcctcggtcccttgttgaaggtcgctttcgtccttcgccttcttgatatccatatgacctagtgtatattcatctggatcccacgccaaaactctgctattcatctcctccaatttctgcacagcaagccgtcccatatcaagtttctcctcggagttcaagtgctcaagtctttccttccatgcatcggcgggatcagaacactagttggtccgaaaaatcgactgtcgatcttttgccagtatgtagcatcgaatgcaaaattgttcctcgcgatgtacgcaatccagaaatccccactttcccaactctcttgcatcggaccagacagtctctggtcttcttttagttgagacttcttgatcgctttatcctcgcgattgatcagggcccttaggaatgtctgaagtcgacactcatactccctacaccagtcttcaagaccgccatctgtgggccagtattcgggcttttcaataagaagccaccaaggtggcacgtaggtgaattcaacgggggcagcatatgtgaacttccagtccacaactgcagcaattttcgattccttgttgagaaggacattacctggtcggaaatcgtcgcaccaaagtttaaaggggctatgctcaaaagatgcccatcgtcttgtgagtttttgttctcgcgcgagttttcggaagagacatctggcaacgaacttgtgtcgacagtcatcggccgagtcaacggcgtcgttcctttggttcataagatgtgtcatatgcagctctgctaagctcttgaagtataacgatgttgaatcgaatgtagtgtccaggcccggtaagcacgcttgaggcagtgatcctaatcgaataagttcattcataggcatcgaaagaggtcgagatgccacttcccaggtgagatcatcaatctggccaagtgaccctatatgagtaagggacggccgagagagctgaagcagaatatttgccagctctccctagagccgctcaagttcatcctcatcaaaatccgggtcaagaattctacggtatgcccgtgagcgacctggcgtattgagaacatcgtacatgttcgtatggtgatccatgtattccatgattataaaggggcccaactctggatccaaagggccgtccttccgcgtgccccaatgaaggacaaaaggaaccgggatggaagtctggtcaagaatgtatcgcattatagcgacctcattgcggactttctcttcgggaaacataatggcaccagctgtggaagacgtattatagcggaactagtattcttgtatgtcatctcaaaagagatattgaaagctcctttttccaaaaaatcaaatgagtcaggcttgtcgggttcgtgatgtctcacaaggaaacgtccaagctttctcaagatgtcgaggtcggtgaactgggcgatccaagcttcagacatctcttcgcttttctcccaggcagcatcatcgtagtacatgcgtggtttcataattatggatagcttgtatagatgaacttggaggagataggggaagatcaaaggtgcatagcgtgacgccgcgtgagcactaaactggaaagggaaagctagaagatccacttgatacatcataaatatgaagttctcaggttaggtacttatgtacacctacgtggcatacgtaggcaattagccttgataactatagaatctgcttagtgtaaccaattgcaggatgtgatcaagcatattcacataaaactacaactcgaagaagaaaagaaagcattaggaattagatctattaccatgaactaaagtttccaaagcctccagacaccttggcctttttgcgagcgggctcaggtgcaatctcctcgtccagaaactctacaatctcatcttcttcctgtccatcccggtcttccagtgctgccttcagatactttccaactcccgagacaccgccatcatttgagtccgcctcagaaccgcggacccgctttccagtccaggtgactcgatcatcgtccgcacggcgagaaatctcctcttcctcttctgcagaaggacccgtggcacctgtggcccgcgcctcttcggcgcgcttctgggccaggaagtcctcgaacggatctacaaagaccgttatttccttgatacgaatatcgggggtagggcgattcgtagttgtttccactgggtggatctctagcttattcaaagtagtggacgaaggcgttgggtcgtcgattagacggccgaagatggtgtgcttgaggttgagatgaggtagggctcgataggcgatgaagctgaaagcacatgttagcgcactcattgagccaggggtaatcgcaaggggccacttacaattgactactatttgtgtttttgcctttgttggccatgctcagcgtgcctcgggaatcgtgcttcaaaggcccttcaaattcatcggcaaagtatttgccccaaatactctcgccacctcgtccagtaccagttggatcaccaccctggagcatgaagcccttgatattacggtgaaatggtatatcgttgtaatagcccttcttggccaactgaaggaagttccacacggctttgggcgcatgctcgggatacaactccagattgagatgcccggcggtggtcacaatgcgcgcgtaagccttggccttcacgcggccacgcttgagcatgtattcctcctccgatagtaccgctagctcggcagacgtgtgtggcgtcagcccggtgctagtaaacgacgcagccgccttgcccgtagtgaatcgtgcagcgttgtagggtgttggctttcccgtttgccccttagaagctacattcgcagctacagtcttcgaacccactttcgagccaatcgcagcagaaccagcctgctgagcacgttctgaccgtgcctttgcaactgcctctttcgctttcagaatcttcgccgagctgccgagtgcactggtgttgacgctcccagaggtcggttggccttccaagattcctgtctccccctccttgatgtagttgaacgagctgaggttgcgcgactcgatgttctgcgggtcctgcaaggtgataatatcttttcggctgaattcctcatccgtgaccaagtcgcgccacaattttcccttgatgttgagtcgctccaccgtatcccaggaaaagacattccctgtattccgtaatgcgacgatatgtgtattatcggtcagaatcttgtaggtcaccggatcgacgtagtcaccatcctcgttcttcgcgagagtcaacttaatcaagtccgagctcttcaatggggccccatcgacaggattggtcccatgcttcttgatccatggcagaatgtttgtgaggtcgaatagtgttcctgtaggcgtgcaaaccgggtgtgaaaatggttggagggaaagggaacagaaattgaacggcaagcgcttgaacgcggcgtgggggccgcccttcttggccttggaaactccagcgccagcactggccgagaaagcatctgcagatgcccactcggagtgtgtgatctagagagagtacaattatcagcggggattcaagatgcgagtattggaatgtagaggaaaatgtcgcgtacataaagcttatcggttcctatagtcaacagcgttagtgaaattgtacaaaaaagccctcacacacgacataccttttcccataattgaagatcaagctgttcagcaactttcgcgcagcgcagcccgcggagatcgaatgacggcaggacgcttaccgctttgagattacggggcgaataatattgccgcgcagaaaatatatcaataagtaagcggagtaaaaggcggtaggctccattaccctcttcgagcaagatatagatatccaacttctacaagggaaatatgggcttaaaattccatttgtattatctggcttcgacatttcgggccatttgtccagaacctgaggtcagaacaaggccagtggataatcatacatgtacaagtgctaaccccccgctagaaatcctagaaacccatgcatcatgaaaacaaacgctgtgtgaacagagctaccagctccgcctgaatcgtcacgcaaattgaaaacgcctccgatgacaatgtagatcgtggtaattcataggattagaaagggccgttgtgtttaggaaattgcgggttggtacttcaatggcacgacccatttgtttccgaaatcaattccatggcgacgacgggtaccgtactttctccagacgatctgagggattccgatgtcggcaactgccagattccaggatagtctttcaccagacagaacagcattcagcactccagtcttgggcgctccgaggcacaccacagatgtggcattgacgcaaagtcggccaccttcgaccagagtaacctcgcctgtagatttttctatattagccacaccagttcagactatttttcgtaagtacttaccagtagaagcattgagtccggaggggacatccacagacaacacatcgacgttgctgcggttcatccacgcaatcatctcaaaggccacaccctggtcgtcagttcgaaggtcgtcaaaggacagatgcatgccaaacaacgcgtcaataatcaagtcgggccctaggtccgaggtggccaaacgggcggatagttcttcccatttgagtacacgtcccccaaccttgcggaagatatcgagctgtttgcgacagttctccagcaattcagcttcgtgttcgagcccgagcaaacagactgtaacccggtgacctcggttacgcagatggcgagcagcagcaatcgcccttgccccagtgcgatggttgccagtaaggataagcatagtgggtgcagcagcatcattggacagaagagccacggcagcctcagctattccccgacctgcattctctgtaatgatctcatcggccaatccaaactcggcgaccgagatttgctcgatctccagagtctgcaacgggctcaccgtaggacagctgcgattggtggttgcgagccggaaagctccagcactagaaacattaggcgcaatcattggcgacaccgacgatcggcttggacgagggctagttgtacgagaaatgttgacgtgaagctggctgcggccaagcgcactgagctgtggcaccattggcggggcctgcatcgcgctgtctttgcggggaggctgagcgtgcgcaggcgcccttggccgctcgcgtcccgaaagtgtctcgctgctcagtttgatttcactaattccttccacatcatccccggtgtcgctgtactgtgggctatcgagtacattctccgtccagtgtaggttctttccgccgttggtgcccggcttgactcttcggttgaagctcaccagtcgctcctcgtctgcggtagtgtcatcgtttcgaatttgttcaaatacagtccgcttatcgaattttgacaggttgcttgcgaagtcgaattcgcccagctcttggatgtcagtagcatcttcggttgcccagccacttggatcctcggcataacggcgtgacttcttcttgcgaagtttatttccagaccggctcatagcttcaggtgaatcctggaatgcagggacagctggctccacaaatgcagtctggcgccagcctttgctctttgggttggtgcttgctgcgccgccgtgtttagcgacatatcctctctcttcccgtacattttcttggttgccacgtcgactccgctttggtgtctgttttgatggtgacagttcctgtgggctttggagtaatttcttgtgggaagtcccttgtattccggtcttgtcactatctgcattcaattccaggctgttaaatggctcaaccaaagaggctgagaccaccccagagtgttggctggcggggacagtcattggcgcattctcaacaaacggattagatacgagaggggcttttgaaaaactcagaatagccgggtcggtaaatcgttgctgtgttggagtagattgagtgggcgctgggggcaaggccattgctgcataaggttgaagctgggggttaggttgatgctgaggttgaagctgaggtaggtgctgatgctgcgagggaacctgggtattggtttcgagagagagggtggtgatagcagaggcatcaatggaatattgaggcaggcgttgaccgttccagagaaatgtgactaattaccaaagggttagttattatgacattacatactgtactcattcatggcttaccatcctggagcaacaagcgctgcccaaatacgttggcgacctggcccaccagtcttccaccgtgtggctctttcaatgtcaccagcacattgtagccaataaattcagatgccatgatgattgtgagctttcgtagtccagctgaacaatcatcaagcgtgcaattgtatttgttggaaaagcgcgtcaaacttgagatgaccctacggagttagacgagagagctgtgagacaagctgggcagctcaatcctagggcacgtgatttatactatcgataagcgatagtcgatagtcgatagtcgataagccgtggagtggcgagggggaatacgagaatacgagatactatagatatagatgcccatgggtggtttgaagcaatttgtgtattgttgatgatcaaaatgcattactgatacataagtagtgagaccttttggatatcgatgttatttctgacctgggaaaagaaaaaaaatcgcaatcttatatatgaatcaaaagtcttcgtcctcaaagtcatctgggttcaaagcaattgaggacttcggcttgttgatctctgtgcccctggtgagtttggagtagaattcctgcactttcggatgcaccatcaccttccgaggctcaaatcgagtaacctgcagtccctcctgtgacaccgctcgacttagtgcaacataagcctggcccttttcaaacactcgacccagatcaacttttacacgttgaagagtctggccttgggccttgtgtatggacagggcccacgccaatatcaacggaacttgttgacgttgggcttgtacttctccgttgggaagctcaaccttccacgtctctggttgacacagtaactggcgttctgacccatctggctgaaggaaagatacaagcggccatttccgggccattgaagctgcgccttcttggtttcccataggcttcagcttttttctagcttggtgagcccgctcctcatcgcttccagtcgtcgcgtcaccggtaaagtttttgtcgttttccctgaaaacctcaaagtaatcttcactcatgaaagctaccactttcccaatagagccattgacaagcgaatcctccatattcttaatgagcatcacttgggcacccttcttcagctggatcataggaggggctatgcagcctgccagcagtctcgcgcgttgctgagggtcctgaattgctccggaatccactgcgttgaacctcataatctcgccagaaagtcttcccatgcgtgcagagttggcaccatccacttcagcgcgggttgggaacctaattcaagagtcagatttgacacagtataagtatatagtaaaacttacagttccgttgcctcgaactggtctttggcatcaaggggccgagagagccgtttaaaagcctcaatcgtgcgaggggtgattttacccagtcgcatttcattcagcatattagcaaactccggatctcgttgacggaagatgttggttaagagaacggtatgttggatacaagtggtccaggaagcagctgcaaacgcaaattttgcctcccggttgcctccgtctgggactggaggtaattgaaagaagtcgcctgttacaacaagctggattcctccaaatggacgaccattgttgcgcattcgtcgggcaatctcttcgagtttatcaaatagatccccgtccaccatggagacttcatcaacgacaaggactttggtacgcagccaacgatttcgagctttcgggtttttcttgatctgaatgttgttagcatctgcaattcctgggtgaatagagagagactccaacccttttcactaggtcgggcactggctctttgcctagacctatcccagcaaaactgtggagagtcacacccccgatattgcaggccgcaagacctgttgatgctgtgactgcaattcgatcggattctttgcgatatttatatcgcagctgcgcaataatttccctcatgagtaccgattttcctgttcctgcagaaccagtgaagaacatgctctttccgcgctcgacaacagtcttaagaacagcttgttgctcttcactcaagaaaacattgtgcaccttcgaacagttctctggtttcgggtttatgtcgcttttttgcgtcttcttgtattcttgtcgcaactctctctgttccgctttgatggtgctctcggacttgttccatggttctgcaggcctcgaccgtttgggggtcacaaagctctttttcttgtcttcgcggggttcctcttcttctttcatccaaggaagagtacgaggtttcttcgcgggcggttggaaatgagagggcggcgatgacgaccaaggtaactgcatgctgctgggaggagcttctgcttcttgggatatggatggaagatcggggtaattgacatctgttagattttcgttgccgcaaacagaccggtcgattcccaatgtagtgtcaaggcttggatatgtgactttgttggagatggcggtgccagccacactcggcataatcagcggatagggctcatcgaggtccagatcatcatcgaagtcattttcatcgaaataaaccgcgttatgaagggaccccagcgaggactcggccacttcgatttttcgtttgacaccaccggattgtgattgtaattgtggcttcgaatgggccattgaattagcatgcaataagtcggcttgctgaagaggtttcgtgccactgcctgagtggtcttggagggctttcttgaacattttctcgggggctgccgcgggtcgagatgaggatgaatacgcaaatgaactcggcagtctctttgggcaagtcaaagagagcaatcgaattatgtgtatgccccgcgccctggatatggcaacatgcataaaatagaatgcagaatgcaaaccaagacgatgaggtcgcgtcagacaattccgatcgggacgcagatcgattttcggtaatcaacgcgttgcagacgcgattatctgcacgtgacgggccactgataaggataacaacaacaccgcaaggctgaatatggatttatctcactagctttgtactattcattgcctatttaagacgttaccgagattccttgggattgaatatactgtatgttatacgacggtccaaataattaagcttttgttggcaactaatgaccatattatgacaacttgtctgtaatatatacttcgggtcaattattcaatattcacaacacattgacccaaaacaactatgaactacgagttactatgatttcccatgcaattagacagagtgagctagatcatcattgtagttaagtgcaatttgtgtacctgcattcaagtatactccagaatgcgaggggaaagcataccacgtgatcgtcaattaccgcaaaatacgcgggacgagaatgcagaatctagatctttccaaccaccagtcgcaagagtatcttgccagtcacacgatattgaagcagcctgcactctgcgaccatgaggaatggcagggatggctgtttcgagtacgtggaacggcttttttctttcaaattcgagcacatttgctaacaagtcatgttatagataaagactaccctctgacgggtgtagtcatatgcttcacatccgtacaagttgagaagagagtatgtgtcagaaagactcgtgaaactgcaagcacaggctgacctacgttcctattgtacagactccattgactaaaatggcggaagaaatgggcgcgttgcacagtgttcaccttacttcggacgtaacccatttgcttgtaggtgacacgaacagcgacaagtataaatttgtcgcaagggaacggaatgatgtgctggcaatgaacccggaatggatcgaggctgtacgacactcctggacacagggagaggatatggacatacaggcgttggagaaacaattccggctggcaacattgcatggcctcaaaatctgtatcactgggttttcggaccgtgagttggctggtttccacaattgagcatagatcaacgctaacgaatgcgctgcagttcctttccgagtttacatgaagaagacaaccgaggagaacggggccgaatataggaaagacctgacgaaatccgtgacacatcttattgcgcgcaactcggacggtgaaaaatacaaattcgcgacacaatggaatatcagagttgtttcggtgaaatggtttacggatagcatcgagcgtggaatgatcctggacgagcagaaataccacccgctggtacctgcagcagagcaaggtgtcggggcatgggatcgatccgcaccgacagaaagggagccttctcggaaggacagcactaccgaagagaactctttgaatccgcgacctcgaaaactacgcaggattgcaagtaccaagctggtagatcaaaacgaaagcatctggggagatatcgtaggaacaggattcgataataacgagacggctggaccccaaaagaacccaccacatgaagcatcgaagcctgtcatacaggcatatcagtcattcgccagcgagactacattttctgaaagcacccagtctcggcttccgctaccgactgctccaccaaaagacaatggatttttacacacgacttatttcttcattaatggattctcttctaagcaggtttgtgctcatcctcttgtccacatacccttgaaactaatgtatcttctagactaaagttctacgtgagcatctcacttataacggagctcaattagtgggctcactaaatgagttctctagccctactattcccaaaacagggcatgggctgttcatcatggtgccgtatcagactcctaggtcagaaattccgtcaacggatgaaatggcctttgaatgcgagatcgtgacagagatgtggctggaaagatgcattgatgctcgagcttttgttccacccgagtctcatgtggcaagcactccattccccaaattccctataccaggtgaggtcccatcaaatgcaatattcatacatgctctaataataataggatttccggaattgcgggtttgttccaccggctttggacgtattgatcttttacacctacgcaaactggtagagttgatgggcgccacatacggagattttctaacgccaaaagcatccgttctcatttgcaacgaccccaaaacagccagcgttgacaaattgcggcatactggcgagtggggggttccagcagtgtctgctgactggctttggatatctattcaaactggccaaaagaaggcattcgagccataccttgtccgacgacaattacccccaagtgctggcagcacagaggaactcggttctttatctgctaagcgaaagcagcctgacagacatcttaatgaaacgggttccccgtacaacatctctaccgagtctatgaatggtggtagaaccgaaaagcaaaattctggaaagagcgctgcaagtcgaacaatacccatcgtcggcgacggctttgaggccgatgcaccgaagccctccgtgccggagtctcgatctccaaccccggccaggataccagacgaacaaaccgcagtggaaccgaataacaaacagtccacgccaaatactgacccggcaccacccactggtccatccgcactggatacggctctgagcgggctcctacagcaagcccgcgctgccaagtcacgacaccagtctgagaacaccacgaccaatgatgacgaaaatccaccccgacgaaagcgcaagcccctcctcggccgcgccccgtcccactcttcggcgcgaatgctggaaggcccgcggcctgtctcacgcgccagctcgatcgatacactcaacgacgatggcctcggcagtgccttagagagcgcccacccgaccagagccaactccataacccgcagcaacagccgtgtcgaacaaagcctgtcatccatgctcagcgatggtaagtttgatttcctgaatgacaaactcccgacccataccgaggacgaagacgaggaaaatcaggcaccgcagatgacgcagctggattatgaagatcccgatgcggctgccatgagggcggagttcctgaggggtgctgggaagttgtctggtaaggcaatgaaggccgatagctcgggtttgcttgtcggtgaagtgcgcgagcttgaggatattgggtggggttctgggcggaggacgaggaaacagcctgttaaagtggacgatgaatgatttttgctttttatttttctctcggcgaaggcatggcattgcattgggaatggcgtcgtcctctttggtccatacattgttttgaaagagcgatatataagggttgttaatgataatccaactcggctctatactaagcaagctacatgtcccctggcctaagctgcatttttgatactagatattttagggataagaaggaatacgaagggatcaccaacaggagatattttgaactagatgcacctctcaatcgcttagggaagttagatgtgttggccactccgaacgatggttgtgctttgggaaccgtcgagggctacctgtagccagcggtgattggaggttcacacgtcgatgtgaaagatggactcgagctagcgttagaatgattgcaaaggcacctggcttgttattctcgtcgattcactccacagatcggtagaagatatgcacagtctgatgcattctgacgtgctcactgttgccttatgcagtggggttgggaatatcttcagattcgctacttacaaaacatggtattaagcggtgtcgaaggcagtctaaaattggtgagaactatccttaactatccagctttgctgttacaattatgaaataaatcaggtggcgcgcactggcagagtatgtcatgtattctataaaccacttcaaacaacaaaatatccgagaaaaagcatctcgagcaatgggaatacaagcattatttgtacgcaaattaacacaatgtaaaaataaccaaagtgaacaactacacatgctaaactattcacttgcccttttgggcatcattatgggcagcaccctcatctccctcttcttttcccattcttggtggtgaattatggtcagttccaccacgagaaagccactctagagaagatattgaatgggccgtatagtcgaagcttcaagaacgaattgagatcatgggggttctgaggtttgccatcgaaacgcaaatagtcaaggtattgcgagtgtatattgcgacagcataaaatgatacttgccaattgggttggctctggtacctacccgaatggtaaggcgccattgatcattcatcaatcgcgaatgtgatgggagaagaagtgatcaatcaaaagtgataatgataatgatgatgatggatggaagataaagacctagctactgccatgaagctctctatatagttccatgctacaaagccaccagattccatccttcagaaaccagaagaagcatctctgcaggcaaacaaagaaagtgccaacacagcaagctaaacgacaagctacctgtcagagaagtgaaagaaaaggaaaggaatgccacagagaggtttacaatattacgtgctagctagttactaaagcagtttctcaagtagttgctaaataagtcgctaaagtaattgaagataaagcagtaaattaagcagttagaggcaggggggagaataagccagtaacaggggtactttgcgtagcgttagaagttggaatcagtggcttcgctctgcaacgactatctggaggccttaggccgtcgagatccctagtatacattcgctctatactgagtcggaccttcaaatcggggaattgacaggctaagcaacattagatggttggattgtataaagtacgaattttactgtgggaaaaatgagtcatgacgcactggcggttggagactgccatactgggcagaaatgattgtaaagccgatgtgaaggaacatcgtggtaaaactcaatagaatatggagaatatgcaaaggaaagatgcgcactgtacaagttaggaggcaagagaaaacgagcggaaaacaaacatcgtaggaatcatgagtggttgtacaaaggtgaacataggcttatgcttgcattgccgcagccattcctccaggcaagggagcatcaagatccaaattctcgatagaacggcggttctcgctactgtcccggaacaggttagagaaatatttggtggcaacatcactctcttgcttgattttggtgacctcttgcttgcgtttgccgagatcctcaatatcctgagatagacaggtttgaagattattggcaggcaagcgcaacatgcggcgaacttcagtcgaaattcgattggcatttgagtggacatagtccatctcagcaagggtggcggcgatcttccgcgacaggcgtgggggaagggtggtcgggatggagctgagcacgtaagctgtggtcagaacagcttgtatgaagttagtatatgattgttctttgtgaaaacgaataggcaaaactcaccagcagcgaggagactagggaagaacagccggcgcatgttgttcgggccaatgactttgacagcactcaaggcactatccacccaaccgaatccgcccaatgccctaccaccaagtacagtgactgcagtcattgcaacgcctgttcctgccatcttctcttggcgctcccagagaccagcaaaatcgaagaaatcccacagctcaacttcagtgtcgacctgtcggccaaatgtgtggcgacggccacggcggaacatcgcatccgcgcggaagttgagtggggtaaatttgtcttcaccaatatgcagaagaccgatattttggatgaaaccgactccttgaactgtcttttcccgggcatagtcctcgcagttgttgacagacgaagcaatctcatccagcattgccagcttcagttcctcagcgtactggaacgctgaaaaaagaccaggatattcaacaccgaggtctgcatcagaaacacgtgtgattgtgttagtcaatgtcgaacgagtgtgattgtagacatcatcgcatgaatcgtcgatagccttgttgacaccctctgcaatctctcccttctttttcttgccgttctcgaatgccggtacaagctccgccaattcatcggtcactcgcttgagctccgactgagcaacatcgcggttgactgtggcaagagagccaatgtcagctaagagattcaggagatacgttttggcaggcgcaagcttggaccgagagcgcttttcaaggacgaaacgtcgcaaggctccttcaaggttctcgaagtcttggagtttctcccgttctttgcccttgcccttatctttggagtccttatcggcgtcgtcatcatgaggatcagagccaccgccgtcaccaccaccggagccagactgcgagaaggctgaaggtgcaacaggtatagcattgctcgaaacgaaatgaactagctcagcagcctccttgtatgtgcgagggctgagtttgccgatctgatctaagatcatgcgttcgcagcgtttcttgtcgcgaatttggtcgaatccgttgactaccatgaaaatatatgccttctcatgtgccgcattcaagatgaattcttttgcagacaatgtgaagtgatttgcggcggaaaccacaaacacaacgacgtcgatctcctcctgtcgagcaaagacagccgtggttttcaacgagtccgagtttaatccgggtgcatcgatcaaagcgatgtcaaccacgccgttgttcagcaatgattcgtcaatagaccgtacatccctgacgtagactttgcactgcatgtacttcgtgttttcgatgacgatattttcgagttcggtgagagcatagacatcgaaggtactttcgtcattgcggttgtatggcgtatctttatgaacggcgtggacttcttcaacgctgcaattttcgcgagcatcgagaacctcacagaagatgctggtgcaaggctgttggtcctctggcaacacctttcggcgcagtagagcattgcagaatgtcgatttgcctgcgttcaagtctcctgtaatcaggaccttacttgaagtgtcctcaattctatctcgcagcgaaaggagatgcttcatgctttggctgatttttccatccaacagggcggcaaccgatgccttttctaaggaatgtactagctctgcctgcgaaagagcgccgagcttaagatccaatttgagaatagagaactcttgcgcaatctgcggggtcatcaatctgggctctgtcggcacacgacgttggaccgaggcacttgattctcctaattcgtcgctaactgccaaggtggctgcacgcctcaggggcggggtgctgagtatgttatcattgcctccaaattcggattgagtttgatgtagtgacggtcggaccatgggggaagagggtgtgctccccacggagggatagtgggcgggccattggcggttcatttcctgaagctccttcagtgtgtcgatggtccgggatatcgcacgagcaagcttggttcggtttgagttgctggaaaatactgtaagccttggacttgcatgaatgatttgtttacggggaggggagacatactagagaagttgagagacatgactggcaaccacttgcttctcatgctcagctatatcccaagatgaattagctcaattatcttccctttatatcacaccattccatgtccgtggccacttacctgcgggattccattctccagggcgcgttggagtatgcaccggagtcggcctatcctccatcaatcctgcacgccaagcagagttcgcatcctcctccgtatcagcaatactgcctccatagccagaatcttgattgagcgaagtcatcagggctgtggcactgtccgaagtcgaaccgttgcccacagtcatataagtcggtgggggacggaaaaaaggattcttctgaggaaattcttcctctcctgagaacctggacgagcccgccccggaagacgggccttcaccagggtgatattcctgactcatgacgaatgaaagacctcaacgtgggggcgacatccatacaagagaagttgtgtttttggtggtttgattatgagatgatcgatttgtcggaaggtttcagatgacgtcgggccaaaaacggattagcgtgcatgtgacccggtatcatagtaatgcgcctgtaatattaccataccgcgattgatgtcactatctctactcaggctcccatattgtacctggatttacttcttacctcgaaccgactgcccataatcccctgcaatcatgaatgtaagctgcatattgaatgcttaaacatggatattcactcacattaggtctcctagattgtcgagtgggctttcggaaagcgcatgacccccgcagagcgtctgcgtaaacaccagcgtgccttggaccgaacacagcgggaacttgaccgagagcgagtgaaactagagaaccaagagaagaaactggtacaggacatcaagaagagtgccaaaaatggtcaagttggtgcctgcaagatccaggccaaggatctggttcggacacggaggtcggtttctctttattgtttactgatcaaagcagcattgactgactgcgacaacagatatattcagaagttctatcaaatgcgcacgcaattacaggctatttctctacgcattcaggtatgcgcaagctttcctccgctatccctcttggttccgcgatgcgctgactcttgctgcttcctagactgtccgaagcaacgaacagatgatgcagtcgatgaaaggagccacaatgcttctgggtagtatgaacagacagatgaatctccccgcactgcaacggatcgcgatggaatttgaacgagaaaacgatgttatggaccaacggcaagagatgatggatgatgcgatcgacgaggccacaggaatggaaggcgaagaagaggaaggagaagatatcttgaaggaggttttggacgagattggtgtcgatctgaaccaggcggtttgttgccccaaacattggaaagtggacccagcaggctaacatattccatctacagcttggcgaaacaccccaacacatacagaaagcaccagtgaatgaaactcgagttgcgcaggctattggagggggaggcaatactagtgatgatgacctccaagcaagactggacagccttcggcgatgattacgactcttctctcttatatgccattgatgacggaggtgataatgcgacctgctgttttgagccctaattgagattacttgccttgctgttattattagcataccttggaagatattctaaataccaatccatttcctttcaacctcttcacatttctctcaataggtcaagggtgcctagccgtgaactagatatttatacataaaatcgcattttggctacatactgttgaacaaaatggtgactgttttctattttctatggtacgagtaataggacagcagatcgctatcaaactcaattcgactcccagatctaatactccgcttgtgattgaaacaccattcccgagatataagattggaagctttaggatggtgcctcttcaggagggggaacttactcatattcacaatcatcagatgcgctagaagaaccagaggaattatatctcgggctgttgaggatggggattgatataccttgatcctgtgatatacttggccatggaaaaccccttcgaccatctgcacgggttttatcatggaatttcttgataaagggtcttttcgaaggtcgaccagactcgagttcttcagcagaccagcgagaaaaccaaggaaatgacgatagctcttccaacgacggccggtcaaatttatctctagccaatgtggcttgcagtacatccctgcagtcctgtgagagtgattcgctaattgctacatcctcgttgatcattctcttgcgtctgcgtttgactactggatagaacaggtcattgtaagagccatcatacctagcgtgccagttcaaactcctcggcactggtttaggctcatcccaggcccagaagccatgcagaaacccgtaaaccagcgttgaatatttccacaggcaaatgtcccgctggtcaacaggtaagtagatactttcgatagagacatcatcgtgggatggatccctccaaatgtcgtacttctccagttcgatggctcgctcgggcatcatttggtactcttggtagggaataaagtggtctattttcattgcaaaacctgatttctcaagcgagaagtagagcattccaagatcgattagttgaacgttgaggttttggtccattaggtaattcgtcactgagatatcagcatggcagaccttcatatctgctaattctaccatagcttggagaagctgagaagcaaccttgcaaccttctatttcccccagttgaggttctttggtggctgcggacataagatagctgccatcaaaagatggaaacggggggtatctctttcggatgcgcggtggtatggccccctttgacttgatcctgttgaaatgaccctcatcaataactgaaatggcttcatagctaggatcaacgcagggggtcatgagaattgctgttagcataccgtgagtgtagaccgagttgagccgcgggaaccttggactatcgtcgagatagatcagaagaagtgcttcttctggcatatatcttttctccccactagcctcatagaagggtcccatctgagcattcacacccgataatgtgtccatccattgtgttgtgtggatttgagatttgattgcgaattgttgaaggtcctccagggaagcaccagcagcgcctttctcgcgagcaataaatgtggcaccaaatgctgtgatcagttagcagtatatccatgaaaaagacatcacatcaaggggaggatggacttacttcctgcgcctatgaacccatatatctgcactcgctcgataaggtgcggacaaaggcatactgctttcgcagtcgtccgcccctcagcacttaaacggatgaaatccccatatgaagtggagttgcatttttgaaacacttcgctgtcgcacctatgacctgaatcgtcccggcaattacacctcgagaattcctcgttattccgtttgccaaacgctacccctagacgctctcgaagaacctgacttacttggggatacctttcggacaatcggcttgaggggtctaaaagtctttcggcattgtaagagaagctatcatcgtagtcctggtatttgaattcgcgggcctgcgacgatggatggtgtaaagtatgattccccttgattgcgcccaagtctctccctaagatataatcaaaagcgtaaggatcctgttcattaacgcccatctgttcagtcatggcagttgattaaattagtcaaatagacaaaagtgatgagtgcagtgagggaagtccaaggagcaaagtaggtcgtttatataaaactcccaaagaatgttcaatgtattgttctcagaatagacaaatgaaaggaatccttcgaaacaattcttatgaatatcaaagagttcctttttagaacaataaacaaggaggtcacctgtaacaaaattaagccactaaaatcttatatttctcagatgatgttcgtatccagataatattcacccgggcgacttgggatagtcatgaggctgaagttgccttgttttgagcctctgcgcccgggcaagaaacgagaatcgggaaagagaaaagtcaagtatacgagcaaacaagatacataaataggtgtctatattctcctcaaagagtcagatttcttcaaacagccgactttcacttcaaaggaagaaacaaagacaatcattcaaccctctgcccttaccaacaacaattcgatgcaaacctcaaaggacaccccaaacacaaacccatcgtttccggtcggccatttgcgatatgaccagaaatgttcggcctccgattcagcaagtcgtgtttacgagggcttcacattttccaaggctatgctcgaacaaagttccacatggatctgtgcgaaacggacagacatgcatcggaatcaagacgaatacttcaaaatggttcatgagggagcaaatcaacagtctgtagcgcagcaataccagagcatatcctctgatatcaggcgcgctcatgtgaatcaactgattgccgaacaaaggcataacaatccactcgttgagtggagttgcgtctacgtcaaagaacacacgcagatgttcgaggccggaaattctcgttgcgcttactatgagactgtatctatggatgtcatcatcatgcaaagaccgatgaagacccaagtacattccagaacctccatgggtggtccagtggctactaggaaaaccttccggccggatacaaagagttcatttatgtgctctcgtcacagggacatttctctgacgccagatcaaaatgggaagatcaatgccataaacagcagcggcatgagtcttgaagatactttagattgttcttcagaaagtaatagcgacccagatgatgcatctatgctttctgaccaatccgatgaaacatctgcaacagacgaccgagaaagaatggagaccgagaccgagaccgggaccgagactgagtgtcaagaaccgcgaccaaatcaggtctttgtccaaaaacagaatgccagtccttatcgacgcgagccgagtcatggacttcattttcggcgaaagtcacaaggatgcagcgggagccttgaaagaaggcatggcaggaattatctccgcgatcagtttgaggtgtctccagtcaagattcttggcccacgatgggctgaaagggtttggtcaggctcggtgcctagtagaagatatcgaatgcaggtgatgaacgacaatgagattcgaagccgaatgcttgatcaccgtgaagcatgtcttggacatcgggagcagtggctgaagagagccttttctgaagcgcgtcagcttgagcgtcctcaaccggtgacagatctgccaacagtgtgccgctgtacctgtcggtgcgcgatcaaggaggatgtatgacagatatattattttattttgcatactaatttgatatggctactgcttttttttcctaccatgagaagaactgtttttaattgcatcattagtttggaatagtcagatttatataaacaaaatttgatcagtcaggtttactaaacgatacacccttcctatttagtgctcatcctggcacagacccacattgagatagtccccctgtgctgcttatcaagtcgtaactccatacctcttgctgcgttgctcaattgcagatctagcggttgtttctgcctaggaagcacattacaagaatagcaaggataatgtacaaaacgcctaagtcgaattagaaatgcaccacttgtgttggaagggatgacttactccaagtcaagctcatacaagtataaccgaagtgttccttgagggatccaccgatgattggtcccagaactgtcccaagcgatgcagcaacatcatcaagagagaaaacacgcgacatgcccccttcaggtccgaagataccaggtgaatcctcttgataagctctcacaatggctgtcaagagtcaatagcaaatactaaagtcgggataaggcagcactcaccggaaagttcgacggggcccacattcgtggtaaaaggtcgcgctgcaccaatggcgagaatgcagcctgtatacaacgctccacctccggcctgagtaccggtccaagggagaatgttggtaccggctaggcccaatagcccaagaatcaccgcttgaaaacccgcagaagccatagcaggataccggactccgaagcgatcacgcaaccacccagccaatggactgataaacagagttggcataatgagacaagagaacaagaacccgctttttccggggccccagccgaatgtttcttgcacatgaatgggaagggtagcatggaagctcgtgccaaccgttgttgtcgacacggcaacgaacaatgcagtcagcgctcgaacatcagtgagaataatatgccagaagttccctgcggtggatggagtttgggcgttctcgggagcgagtaacgggctggtagtgtcatgcgtttctgatcctgtcgattctcgcttgcaattggaattctctactgatcggctttcgatcatgataaaacgcgcgccaaaatctatagtgagaagcaagagcggcaatgaccacgtcggccaatagcctacaagttccaagagcaaaccagaaatggatggcccgcctattaatccagtatatatgaaggacatcattaagccctcgaccttacccatattatctccacccacggtatcagccacggtcgcgaggccaacaatccatacggaggatccggcaatgccctgcatcacacgaccgacgaagagaacagcaagcgaggttgagccagcgaccatgccagtaccgatcatacacgcgacaagcgatagtagtagtgggagctttcgattcgaggttttatcagcgaagtggccgatgatgggacctgaaacaaccgagacgattccatgcacggcgagaacaagtgacgtgagttcctggatcctggattgattctcatgtagtcgcgtacgaagcatgtacggtaacataggcacaaggaagccatagaggaatgtttctatgcactgtcagccactggctcaacaagagggcacagggtacacgaaccggcgaacaaggcaattgcgactgtcgagagaataaaccatttagaagagcgccaacggaagcctataggcttactactggcatggaaatccctcatgtcgacttgagttgtgagtagtaaagttcaatgccatgaaaatgctataggaatatcatcatcgctacaaaagcaaggtttgacctgcaggatcgctgatcctcagctgggggcagttcatgcgacgataatgcagggatagtgcagccgtatcagactagtattgcccagtcttatagactacgaatcggactgaccgggtctgcagtctccacataagatcgagggtgaaattgaaatgacttatagaactgtggagacctgagggttatgctttttgctcatacctattggtccatgtctcatccaactcgtactaaagtagatgattctattcttttttcctttgaaaacaaggctatgaatgtcccagtgttcagaagatagtacttggtacatgcgtgacaattgtagatcatcgaatatcgatcactttaacattctaaagagctccaagtaagacgaaagagcaggcatcatctgcccatctcgacctgacagcttcagctaatctagtcttgtgtcttgtcgatgaaattaatcactttccgtcccgtagtgcttctgatgaatcccgaataatcacataggtatttcaaatcgaagagctcttcgttgttcccaaaaacggtgaagaatcttcgtaactcctgtgtcagttcttcttcgccaatcgtgcctggctcatcgtgccgaagcacacgcagctcaagaacaatgtcgagatggtccttatctccttcattatacctccggatgatctgatactgcaaaataccccatgactcggttcgtagtgcagcctggacaactgggaattcgaagtactcgccgtaccaatcaaagctgattcttcggtcgcgtccataaatccgcgcgactttgtagtgaggtgcatcttccggtgagattttggctttgataaactctggcaaggagtggagcgagcaaacatcaccacagacatagcggatgagaggatgacgcagtctctgcagcgaggtttgcacaagcagccctttctcgccatcaggaagaggccgaacatcgacattacatgggtcttgagggtcctccacagcaaaagggaatacctcaagatgcatcagacgctggtcatacacaaaatcggcgaagtgttgctccttcgtggtctctgtcagctcggctggcgaagcggcccaaggcccagcttccgcactaccaattaccgacgagacagctatattgggaaagacagagttcaaaaagctgcgctgggccggggtcattggctctgaggtatacagcgccttgtttatcagcagttgccttctcttgtcctctgagagggtagagatgtatcgcgctagctgaatgatttgtcctgcgtcaccggcaatggcatttactcgatatccaatgagtgtctcgatcatctggtcttgctccatctggctgccagcacaaagaaccgtggcgccagacccctcgagcacctcggaaataaggtccaaagccctgcaagagttaaaatcagtttttccccaattgaatgaatacaagtcaaaaattacctgtaaagatgtcccgacacgtgcattgtcatgatccagtctcctggtcctgtgatcccacaagatcgcaagagagatccaatggctgctcgttgttgacggatctctcgcgaatccgttgcaaagaccattggaggccctccaccagatcctccaccagtcgtgctgatgtaagttccttgtcgatatccatttcgagggtcttggtcagtggtaaggcgagcgatctccttgtatctagcacttttagctatgcaggaaagaaatgaaagcgggaaagcttacagagcttctttccgggtcaatgggaatgctgatagcttgaagtctgttgctgactctttttgctttgctagcagaataggtaaatcttcacttttcgttggatatggagtgtcagaataaaacgggtggatactggcaatggccagaatatcgcccaagtcgaagcagttcgtcatcttcagataagacgcaaacttcaggtatgagcacagtgcatgctacaatcagcaaacttgagcatttatgagctcaatatggaagtatttattagtcaattctataggtaaagtgggttctggtggcgggaggtggagtacattattcaatagtagcgtcgcgctaatgtgcctataaatgtggaccagatggagacccctagggatgcagatcgcctcatgcattagtatgtactagtattcattagttgtatcaataccggtgtatttgactcaaaaacaccagtgaggtatacctatatcaagaccgccacttaagaaatgcagccgccagaatatcatgtccatttagaacaacttttacatcaccgcgggcgcaactatgaagaagccagtgaaccactttagcagtatttgctttccccaaagtggtgaaaatttctttcacccagcagatattgaccccgagactcgatccgctctacttgagaagtatcatctcgagctcgagaagtgtagccgtcgggagacgtgggctggtgatgcccaccataaatcggtgccttatccagtgcttggcaacgaagctcatcaacgtcagctttcagagctaagcgaggcattggttctagcaattaccgatattgtggaacgatggtggtcggatgttgaggcccgctttccaaagcggatgccggtcgaaccagttgaggaaaacctgctgcaagtgagtctgaatccttggaattttgttgattcttgctaaagtggtttagtggatgcaacaactggatgcacatgtacttcgtccattcagatcctgtcaaggctcctggaggcccgactttctgcttgaatcgtcggatgaccccgagcggatcgagaattatcgaatctgcgagatcaacgctcggttttgttggaatggattcctctttactgcatttggccaacaggcccttctgaatatgggtgtcgagcaatatggtatcaagggagccacagacccgcaaaaggtcagaacctcgcgtgcctatacataatagatactgatacagtacaggtcattactggtttgaacagcctttttgattcttcactccccttacatctagtcaagggggaggagtacggatacgatatccacatgttcgtcccatatgcacagcgttgcctggggatggatgttaaagtcattcctcccgagagtctccggttgatacccgctgcagctcccggtggatacaaattgtactgtctgtctggggaaaataccaaacagccgacaatattgaatgatgccggcgagtctttagaagaagtgcatcagctaggtgtggaactgcatcaacgagagttgcttgccatgagctttgaaatgcttcagcaaatcagcctgagatgtttcaacgacctgcgtactgtgcttctcgttcatgacaagcgcatgttaggcttaattcaagaagagctggattcactggttgcacgaaacgtactctcgccgcaccaagcagggatacttgataaaggacttgtccacacgatgatacccggatcagacaaattggagcatttcatatccaggtgccagagagacgtctttaccaaggacaactatctgcttaagccagttcgcagcggtaagggagcggggatcttatttggtgatcaggtcacacaggaggagtggatgtcacttctccagggcatgcgagatcctcgcctaaaatctgggaaaacaacctatgttgttcagaagcaaattcaacaacggatatatgatgttctgcttgaagaggacgctggagttggaaactttcctcttgtcggaacctttcacatcaccaatggcgcattcctcggccttggactctggcgaagcggccccggtcgaatttgtgctttaagtcgtgggggagcctggatgtgttcagtgattcaacagtgacgaagactgatttccctggggccaatactgttcgagccatctcatctcactatctagtctgatttcatcttacgctataagatttgcccttttgttactttggttcgatgaagatactttcagaaatgaccaggcatgcctaagatcttagatgggctgcatgtaactagcttaccccgtataactaggtgtggactatgtgtgtaaggtccatgtctctgtagcatagactagatctacggagcaatcaccgagagtgcagccagtgcatcggcctccgccaattccgaatcgtcaaatatcaacctcacatatgaccgtattggtacatgatacacgatacgataaatgtcagcttggttcagctgactgaggaagcgtaggtaaagcagggagtggcgtaacaagtatccactcctcacgattgattatgggcatgagaagaaaccattagcaaacgaaaaccttctttccgacgcatccaatttcctcgcaaccgctaaagcagtgagatctgcttgcatatggagaaatcatactttagctcagccgtacttggtataatgtcgtgggtcaatttttgttccaggaatgtggaggtggctcgcgagcaagcatgatgaagtaggtgcgagggatgagcaatcgtcggtatatattcaatgtataaaacactctggtacccttggtcctcgccttcttccatcctatcatcattaataatggctacaatccaacgattaacgagatctctccccacgacaaggaagcaagtcgttcaagtacctagaatatgtgagctttgagtccacactcttctccccatatttgctaatgaaaattgccattttggacctatagcacgtctcacagtctcgaatcctgccactgcttcccaacatgaccacctgcgtactgtccatcacacccttcagagtgccggcgttctacaaatccaactcggcttccccgatgacgaaagcacttaccttcacaaactattattgaatttgcaccaacaccacggccatggactaccgatcacacacagtgcaaatcgaggttggatgtgggacattcggcccagccccgaaagcttccagagcaacaatactcaagctcgatctgagaccatggaagaattcccttggcacacagattgcagctatgagagctctccaccgcaatacttcgccctccaggttcttcagccagatcgatgtgggggcggtacattatccgtcttgaatgtcgacgaattgctcacacttctctcaccttccacccttgagaccctcttcagccccaattttcagatcactgtcccacccgagttcgtcaaaagtcaggcagatacacagatcgtcggtggcctgctggcaattagccccgagacgaacgccatcaagctccgcttccgggaggacattgttgtgccgctcacaaatcaggcatctgaagcgctagctgaactgaaatccgtcctgttgggcccagcagcccattcccgaatactcaacttgagagccaagaatctcccgcgtgggtcgatcattttgatggacaatggacgctggctccacgcacggaacgaagtcaaggacccagatcgacatttgcgacgagtgcgttgggacgctcggcaatttgccagaccttccgctgctcatctaggtttgtaattgcgccatgagataccaagcctgcgctcagcatgtttggttgcattttcttctcataattgagattatatagtataactcaatgcatttccggtgtcattgtcacttgcctatactattgttttgaaaatcaaaatcctttctcgcaccatctactatgtggatcttctaagcccgattgggtttgttatccagccacgtaccttccacagtggccgaacaatgccgaggaatggactcctctttcgatggggcttcagctgtaagaacacgggttcctgacctgtaccttgacccatatatatgggttcgccccgctggatcagatttgtgttttttttccggtggtacagggtctatctcccgcttgcaaagtctggatggcatcggaactgcagatggcagatcgaaagcgatcgacacaaagttcctggatttggtagcatattggcaatggcaaatgcccctggcgttgccatacagtgagtgtatgtactccgtatttggcggtactctatatagttaccgccatatataccgcccacttgttaaaatactaccataggttaactagttatgtgttatagaccggcagaactggcagaattgaaatagcggtacggagtacggagtactccgtataatgcaaaatccttcccaacacttcagaagtcccactgtatatgcgcgcagctcgcttaaatagaaagacaagtgctcaaccaacacccagtcttcatatcacatgcgtttcctaatactctgagacacccccaggcttgattccagaaattatctccacatttgtatgttgcctaatccgtgagttggctcttgctgggaaggaagctcagggttcactgcactctcggcgtactatattaccttggcaaataaccaatgtcttggctgaactcaatgttacagtttgtgtgtgtataatttactatgacccatcgcgggttgaatatcacatcacgtgacatttatagatccaatgactgacatcttccttggctaatattctgactactttccttgactgctgtgtggtgacatagaaagacgaccccgatcttgggaggaagtgaattcaaattcggagaattcttaggcgagaactgagacacctttctcaagcatagctatcttatattatccgtcggaagagcataactatctgaatagtacagagtgtctagtatcaatttgcttcgctcgacatcgcagctgcagatctcgcgtcctccttttggaggaccaagaaaaacaaggaacagatatactcgagtttgaataatgagcagtatctattacatctttttctggagctctgccttcaggacgacttaattacctagtttatacggcagtagcccctcgttgaaccggaatttcggttatttactttcaagtttgttagtggaattctaaaatcgttgtttgcgaaatgtctactccatgcattgataatgttggagctgtcacaggttggaaacactctagtaagaatgggtctatacccaatcaatagtactaggaggagcgctccgccaactattccatgaagacttcaggaagagacaagcaactgcgtactgcaaggagagctttccttggacaatagaccaaaaatttgccattctaggaacgtctagagtcacttaccttgcacaatagctcacatcctctcgtgatgtcttttttgtatgtcttctgttccacaacgataaaaggaatagaaaaaggcgttaggagtggctatatcatctcgtgataccattgtggtcttagagcaaacaaataaaactcgtgatatgtaattctgaagactaaggccgaatttttaagtatcttgcttacagctctccgagtatgagaataagacataaaggttcagaccaaaaacttcatatataaatggccctgtcatctaaattactggctacatataacactctggcgtctttcccaagcgctgcctacttgctacttgtataaatcgcccaagattgttcaatccctcgctcttgatcatcactgataggctcgaaatcaacagcgctggtatcttgttcatcctttagtgcttgcctcttcctttgagagtggacacacaaagaaataacattatctcttgtatcgtgcttggtttgagatcgacgataatggcagacatcacgagcagatttagatagccgctcaacgaggaatcgagagcataagagatatgatagttgagtagtagacaaatcgagtctgaatcttttgaccttgaccatcattagttgtaagcttaagggtcttgagtgcattgggggtaacctcaagagtcaagaccctccgatagacttgtgaaattcctcgcatcatggtcgaaggaagtggctttgacaagatgggctcattcgatcgtaagatcggtaaattgaaaagaacagggacaacgaagattattacagggctgattgactaaatgttgagccaattgatgggatgtgaacctggggccataggaagacagtagcctcgcctttactgtgggtttagctttgctggcatgttgggccgcagtatgttgtaggtatggtaaagtactgagtggaggggtctttctatgttggaggggcattaagggatgacgtaattgagcgctaaacccagagaagcaaaactaacttgaaagggaaattcatcgtttacataaccgatttactttcccagagtcccttctcccggccaagtcttcttcttcttccatagctatcaacattcctgaaacttcttctttctcttttccatcccctcataaactttcaatatgcctcgccaattcttcgtcggtggtaacttcaagatgtacgttgtctcaagctatgctaccccgcggtctcaagcccctcacattttaccaatgcctactcgttcgcgcaattgaccctataaaggaacggtgttgctaagagcatcaccgaaatcgtgaagaacctcaattccgccaagcttgacgacagcaccgaggtcgtcatctctcctcccgccatctacctcgctctgacccgcgagctggccgaccccaagattggtgtcgctgcccaaaacgtttacgacaagcccaacggtgctttcaccggtgagatcagtgttgagcagctccgcgatgccaagatcaactgggttgttatcggccacagcgagcgccgagtgatcctgaaggagtctgatgatgtatgcataccccgcagtccccgaaaccccaatcatcctcaaacactgcagccgaatgaagcatcaactaaccactgccccaatagttcattgcccgcaagaccaaggccgccattgagggcggtgtctctgtcatcttctgtatcggagagaccctcgaggtacgtcattagaacccggttttcccattttcgttccgatagtgggtcatcgggtccagatcggctatatgtcttctgaatgcatcccgctcacacccgattcttatgtaggagcgtgaggccaacaagaccatcgaggtcgtcacccgtcagcttgacgctgccgccaaggagctgagcgcagagcagtgggacaaggtcgtcattgcctacgagcctgtctggtatgaacttatcgcattgcttctaaatcaacatacccctggacatatctaacatgtatttgtagggctattggcactggaaaggtcgccaccactgagcaggctcaggaggtccacgccgctatccgcaagtggctcggcgaggctatctccgcccacgctcaggagagcgttcgcatcatttacggtggctctgtcagcgagaagaactgccgtgagctcgctacccagcccgatgttgacggtttcttggttggcggtgccagcttgaagcctgcctgtaagttcttagcacctgcccatctaccgatttgttcaccaaattggtactaaccaacttctacagtcgtcgacatcatcaacgcccgcatctaagggatttccgaaagaaaccaatacccccatagtgcccctatcatcagagcaaaaagctctgtgatgtaggcgtcagaagataacagcttggaaattccaggaaattatcacgaatctatgtacatttctgaagtatatttcgataacacataatcgttgctacccagcggagcagttatttccttagccaaacagactgcccaatgatatgcgcctagacaacacatgtaacctatgaagaatacaacaccgagaccccaaccccccgccaatacgacatgccaggacccccacctccactctgggccgagccggtggccgaaaccgaagaagcagaaggcgacaatgagaaggaacccggacctagcccaacacccgcgctcactagaagctccttaacacggccttcccagagaagccgcacattccaagattggtcaatgcgcagcttaatgacagaatcacttgtctcggcctcgccgtgagcgttggagcctacggggccttcaggttgagccgggtccgctagaagcggggaagccggtgagccaggcagggaaacgctgaagtcatgcatgcgtactttgcggcgggcccattcgagatcgtcgtgactgggggagctgggattcttggattgacgccatagctcgcagccggcgaccatttcactttcccagctgtagacgttaaagccgaaacgagagctgaaggcaaggttaggcgaggcgcggagggaatatgttgtagataaagagcccacaatcggggccaatgttagtgttagagtgtaggggaaggtcgatataggtgtccgggtgctggaatgtgatgatgatggcaggacctttgtggctgcgggtaatgtggtgaatcgcaggccggttgacatgccaatcagtgatgatatcggggaatagtacgcctctgcacctgcggacaggagggacgatggcggcgggacgtcgtcgtgaatgtatcgaggatctgggccgaagttccagagtccgcgccaaccgaacagggcgttgtctgtgctgaagaggtactcattgctgtacttgcccgtgtcgtgggatagctgggtgagcattgaggcctgtggagcggacttggattgcggtggtccccgagttgagcagacagctagcgacagctgcatattcgtagagattctgcgtagaaagagcgcatatagagtggagggaggtggaagatggagagaagcatggagcagagtagctttacgctttgcctcgctttcttcgctattttcgctattttctccgtctttaggatttggtggttctgggtggcttccgtctgtgagcccgggaatgctaacgccgtctaagagcgagtcatatccccaggtctggattggggccgcgggggcctgcacttgacggtatcccgggcatatctttcgaagcgggattgacgcacttctgcttggtaggtcgttaaatggcacggtactaaatagatatgacacagatccatcgagcaagccaacggtgccaagtgtgtaactggtcgcgaaatggggagtggacagtgacgagaggtgaacgcgcaaccgttcgggggtcgagaagtccaggatcgctgtaacaactgtgttaggccagcaacttccatgccccatagagagactttggggggataaatcaattacatacattgagcggtggtgttgagtgacgagtacgagttgtcgcgattccagtgggtcgcctcggcgaaggacagctggatgtagtccataaagtccagcattgtccaggctcagcccttgcaggtgacaatatgactagcaccgtgaaaccaaacaagatcgttcgtagcaagcgcaattgaagacccgaccctgagagatcacagctgattgccccattcaggttagcgttggataagcccggcggtgggttaatccggttatcagcgaagaaaaaatgtctgtgggggaaacatctaaccttctgcctgaattcattgaaccaccaattccaaaatcataattcaatatgcctcgttcaaagcgtgcgcgcatcgtccacgagtccaagactgccaagaaagatcacaaggagcagacccggcgcctattcgccaatatccgggaatgtattgaagaatatgatcatctttttgtctttgcggtcgataacatgcggaacacctatttgaaggatgtgcgcactgaatttgccgatagccggtaagaatcattgctccaatcggaatttgcataagatattgaatcggaaaaagcgcttgatcaacagcggtggatccgatatcaaatatttatatgcaaatccttcaaccaaaagatcagttgtctaattatgtctttccagagttttcttcggcaagaccaaggtcatgggcaaggcccttggcgctgatgtcgaaagcgaagccgctcccaacctgcgcaaactcactcctttcctcgccggtgccgttggattgctattcacctcccgcactccggaatcagtgatcgactacttcgagaacttccgtccccaggatttcgctcgcgctggaactgaagccactcgctctttcactattcccaatggcctggtcaccgcacgggccggcgagatccctgctgagcaggacgagcctgtcagccacaccattgagcccgcgctccgcaagctcggtgtccccacccgtttggtgaagggcaaggttatgcttgagttgactgagggtcaggagggctaccccgtatgcaaagagggagaaactctggactcgcgacagactacgttgatgaagatgttcggtatcacctcgtccgagttcaaggttgacctcaaggcctactggacgcggagtactgaggaggtcaagatcctcgagactgagggtggaatggatgttgatgcatagatggggatcttcatatttttccgttttttatttcttctctttcccattcggcttccgtgtggccgaaaaaaagaactctgctgggcatcttttggagtttggtgagggcgctttctttgcaaatatattgaagacttgtgtgttttatctctctttctctcgcatccttatacaggaggctttccctcctgctggattatgagcctatgacaagattcggataccaggtcgaaaaaagtctacaaatttacctcgttcttggacatatatcaaccgtagtgcagaaccgctagctgtattgcctagactttcatctatctagcaagatacctgcctttcagtcgtttcacatggtccttacctggtcttacctgatggttcaccagattccatttttgcgcggaagaggacagaactaaaatacaatacttacccctgcagagaaaacgaaatctcataggaccaaggggaaaaaagggggaaagaaaaaaaaagcattggaaaacgagtcaagaaaacacgaagggaaataagaatagatagaacggggaatacaagcacaattcatgagaatctccgtctgccgaggagtttagatggaccaagcaggggatgtggtgaataaccactttgacatcgagttgtgatgttggtatgaggtggaaaacattgacggttgtgagcgttcgaaatgaattgcacatgggccaattcatgatttacccccttacccttgagaaagagtgatacaactgggtagatcagtgatacccaccagtacaccagcaaacccagacttcatcggaaagaggtaagacccgggggataagtgaagggtttaataccttctcctggaacgaggatcatcgtgtccaggttcatcctcacggtttcgcttgcgtccataatcctcccggccgccgtcacgaccgccgtcacgaccaccatcacggccaccgccgccatacctgtcaccacgttcaccacgttcacggtcccggtcgcggaatcggtctccgtttcggtctccagtgcctcgatctcccatgcggtcacgatcacgatctctgtaacggtcgtcacggtcatagtcgcggcggtcacggtcagcgtagctatctcgaggccgcacaggctccgaattgctgccagttgcaccacggtcgaatctgccaccggcgccaccaccgcggtcaccacgatcaccaccgaagctaccacctctgaaacctccgctacgtccaccgccagggccggagggcgcgttagggggagcctgtccaccgaagccgccacggttgccctggtatccgataccaccgcgaggaccaccgaagcgatcattgccaccgcggaaacctccaccacggaaaccaccacctccacctctgcccccgaagcctccgcggaatccgcctccatacccacccggtccagatggtgcgttgaaaccaggtccaccacgggggagttgcgcaaccttggtgtatccgcgccctccgagaccgccaccaaggcgacggggcttccaccccttggtggtgcggccacgctcgacatctaccacaactggtcgtcccttgatactgaagttctctgtgtctttgtaggccgctgatattgatgaaggaactggggtcagcaacatttcttaccgcaagacgaattaaacgggtgggttggatgccaagtaaattgccatggttgtgatacctttcatatccttctcgcgctcgaacacgacaaatgcatagcctctgtggggtttctttttcttgtctgatactgtatctttgatgatggtaatctggaatcacaaagttagagctgtttatattcacaagggataaggaaaacaagacatactctttcaatgggaccaaatcggccaaactctcgttccaggtcagcttctttggcttcataactgaggcgtgagacaaagatagtcctgaatgggtcgcctcgagcttgaggatctttatccggattgtctgtaagacatagccacgttagcctcttgaaataatgtgaaatgtgaaaagaggataaagcgtacagttttgcagtccatccgctatctgcttctctaactgctctttcttctcgactttctcgcgcaatttgcgctgcaccccgctttcagttgcgttgtagggaacttcatcggcaaaagttttagcatcggcaaggaactgggcaaccccagagatagtgctcttctggcagtcatctggtgcgcgatcgcctggaggcagatatcgaaggggtggacgcggctggaacagcgccagaagtggcgggggtagcttatccgtcatactgagtgtgaaaccaatgcagataaagtggggatgtgaagtaaagacgatatgtggaagatgagtgaaacctcaggagtcagagcttcgtgtcgcagttgtggtcttagcgggtcgaatgatcaaagtgctgcacacgccattggtagcgtgactcaccgcccttaccaatcacgtgcaccagaaaatgccccgagagccatcgcgacttgtaaactccggctataactattgacgactggaaagatgccgttgcgcggaattagaacatctacggcggccagggtatgtgaagtccgaatgtttgatattcaattgacgaactgacccaaatctgcttagaacggcgccggtgccttcatcctacaatgcaaacgccttgacttccattactgcaactgggcgggcagctcaaagggcatggtgtaggtgtatcctaaatggtgaaactgaaactttccagaaacatccgtactaacattgaacatcgcagtactttcttagagaaacacctccccgctttcgcccgcgagaaccctcagattgaaatccgtgtctctccccgaccccagaagcaccccctgattaagggcctttatatcaatggccgtgagaagcccgtgtgtgtacggaacttggaacctcacgaaatcctgaagaaggcaattctcctcaaagaagctagtggagagaagttgaagcgggtcaagaagccagtcacaagtttgaatgagagtgtgcgtggtatctggtcaccataccacggtgatcttcggggagtctagacggttgtattttattatttacggttcatgttctctctgcggtggtgactatcaggtatccccactgcaacctactgtactattgacctgggttgtgtttatttcttcgttcttgtctatttgctccctggaagccaatggtgttttgaaacccatattttatgcatacaaaacttgagcctatatcaattctcttccatgatttctctataccggaggtcaccgaaagtttggcttaactccggactccgggatacttctttcatccaaatccgatggtcacatatcttattagcctgatttggatttgaaagcatacatacgtgcctaacaaggctggtgttggctagcttattgcatggttcgcaatctacttgaccgggggctcggcttttgccagtgttcgcccatcccctagttttctacctgcgtaatcctcttccctcactctcatatttcatatttcatctgagcgccttacttgcgaaaaagtgaagatgcagtgtggcatttctgccgacactcactttggaccccgagtgctgccatgccgtcgcgatttcgactttacgttgctcttcgagcagggcattctcgctttggctccgcatcttttattcctcactctgtgcattttcagtggtatcatttccacagagagcccaggaaagtacacgtagtgctgctggcacttggaaagtggtaggtctcccttttccttagctccgaaattaggcttgcaagctaatgtgatattgaaatatcaagcaggtcatttccactctactactagctccgaaacttgttctcctcgtttgtggtgtttaccaaactctccaagaacaaagctctcggttccgtctcaaagaaaggaactaatcgaaatatagtgagcgtactaggatcatcctatatcgcccctcaaatgcgccaaaagcaaaaggcttgggtacatgctgttcaggagagagtcaattttacttcgataatgctgaaagagctgcgccagatcaaaatgttcggtattgaatcagacgtggcattcaagacaaacggtcttcgtgagttggaactccatcaatcaaagccctaccgatcaatgattgtcggtgtcaatgttttgagtgcgttgtcgactgccatcgcccctgccctaacaatagccatgtacgccactacacagctgaacctcaggctagagacacccagtactgatgttgccttcacaaatctgtccttaatttctcttttgacaaacccggtagtactactatctgtctccttgactagattcacatccgctattggctgttttgatcggattcaagaatttttttgcaagaaaaaccgagtacatgggctctcatctgtcgatgaatacttgctgcctgagaacgtgttagggatggaacccgaatcagtgccgactcagtcacaacctcttgtctgcatgactgattgctgctttagcctgggcttagaggctccagcaatactccatggactaactttgaagatccaaaatggtttttttttggctgtgactgccccccttggctctggcaagtcatctttactcaaagatatgctgggtgaaatgcattctacggaaggaatattgactgttcgttcggtcaaacaggcgtattgccagcaagctccatggatattcaatggcacactaagaactaacactatcggagaatcaccactcgacgaaacgtggttcaaagaggtggtatatgtctgcaacctggattttgaaaccacaactctttctcttggacttgacacactgactgggagctcgggagctgaacttagtggagggcagaagcaacgagtggtaagtatatcggtaatctcattccatcttaggtactaatttgcgtgagttcaggctttggctagagcaatttatgcaagatcatctttgctgattttagacgacatatttggcgccttggacacagtgacatcaaggctaattttccagcgactcctcgatcgtgctggcttggtcaggaggctgggtatcgcaaccattcttgtgacaacagctggttagtctaacttgaacccttcaaatgcttacggcgctgaccattgcctttatttcactagtggaacacctcaaagaagccgataatttgattgttctttcaaaggacggtcgcatggaatgtcaaggacttttcgaagaactggcgaagaagaatcagtacatacagagtcttttgtgttccccaagtccggaagacagtgaagtcgaagaagagagcaaggacagtaactcccaggtgggggaaatacgagaagagaagaaagaaaccagacaaacaactcaaacaaagaccgtttccaaaatctccagggtgatggggacacctcactctacacgtttggttggtgggcatgtgggctaacgctggcattcacaattctatacgtgttttgtattgcatttccgcgtgagtatacccatcactggatatattcagagacattgttcctaaatcatatcgcagaggtcatgcttagctggtggtgtgactcagctcctccaaaaaaattatatttatcttggttcctacgtcggcatttcttccatcgccatagttgcgatgggggtttttatcgggtatgttctcagcactgcgacgctatatatgtatggagacatctcatatatcttaggttcttttttgtctggactgttcccagatcggctgttaagctgcatgaggtcttcttgggtacaataatgaggtcaggaatggggacagactccttttatattagactgaatatgttgctgacgagcttttcagatcgccttggccgagcctggctcgcatatatacaggaagtttgataaatagataagccatataattgagactcaacgttgtgatttcatcgaaattaacctgaaaaattctaaacatctccagatttagccaagacatgtctcttctcgacatgcagcttcctgttgcttttggcataactccccagagagcgaatcttcgttccccagcattcacaaattgttaaatactgactttctatcgagtaggctttttgacctgtattgcacaaggggacttgatcgctactggatcaggcttcatgtctgtcataatacccttctgcatcgttgcggtatggataattcaggctttctacttgcgtacttcacgacagatcagacttctcgatctagaagcaaaggctcctctgtatgcccacttcatagaaacgacagagggtctaactactgtgcgtgcactttgttggcagcgtcaatttgcagatcggaacaccgagctcctcgatacgtcccagaaaccattttacaccatgtattccattcagcagtggttgcaggttgttttggatctacttgttgcgggccttgccaccgttcttgtttccctagctgtttttgtgacaaagcaaagtagctctggggccgtcgttgtgaacttatttcattcaactcaactttgacattgttgattactaattggacacagcttgagacttctctaggcgcaattgcaagggtcaagcaatttgtgactgacccacagctacaacctattgccagaagagagatggcttatctcaagcgctggccttcggaaggtcgaatggaatttcgaagggtttctgcttcatatgggtaagtgtctctttcagcatcactctgttacgcaaatagaaatgaaccaaaggactaagattgctattagggggcatgattccgttccagctgtgcgggatatctcatttacactggaaggtaaggatggataagctttatgaatgaggcataagtgataagttgaatagtgggaagagttctttacttgcttgcattttctctctcgcgacgatcacgtccggcgaaatctacattgacggcattgacatctcaaccgttcccaaggaaaagcttcattctgcattggtcccaatatcccaaaatcccaaaatcccctgattcttcccggttctgttcgccaaaatatttccttgggaatatcatcaacgattgatgactcggagatgatttctgtcctggagggagtctaaatttggaatcagattcgtgacaatggtggcctgagtgcgagcattgattcaactcatctgtcaaatggacaaaaacagatcttctgcattgcccgtgctattttatcacctggtagaattatcatcatgaatgagcctacgggcgggcttgatgagcacaccgagagattagccacagagcttcttcgtgaacggctgataggacgcactatcatttcaattgctcatcaaatcaatactgtgatggactcggacttggtgatggtaatagatcaaggtacagtatctgaaatgggagaaccgcaagaacttttgagtaggaaaggcatgttttggcagttgttccggggcataaaaggtgtctaaattgaagtcagccagcgagaatccgttcaaatagtcttctaagaaccacaaggagctccaccgcaggttccacaacgggccgtcccgcacaattatgtccacaccgaatcaagaaccgttggatatttttcgggctcactagacagatttctctaatccacattgacccaaatcaatcgcatcatactatacttgtgatttaggttgattggttttgatagcagctacaggattggtaggaatgtgtctctgccatgtggccctagcatcatatatatcttagcaaatcttcaatgccaccgtcttagtctgagttaaacgtggcataagaaatctgtataagcattcttttgtaggaagctctttattaggcttcaatcatgcacaggggctgtctcacctagtacggcaatgagttagcggcattaacggtcacttgcattacccactacttcacctatagtcacagtaaaaacaaaagaaaagtaaccatgcaagctcgctattacccgtagagctgacactattgagtctaggcgctaggttaaactcttgggcgaatcggctagggatacttgcacaatgtaataaaatatacgaagagggacggagagtacctgcacgtgctaaatagaggagattagttgaccattccctcccttttctttctttactttttggctatcgtgttcaagtcgtgcctagcagttctaaataaaacattaaatcaaatctcaatattgtttgcactcttatctctctctctcttgtggaagtccacaagtcagagtctatgaatatccttgccaccccacgacaggatgaacagaaaagggagatactctggtcggattggtggaaactgagggggcgggatttcgcccgagtcaacacccttgacatattcaacccctgaattatttgtcccgcacatcagttgttctcacttttactactccgtatgttgtacctatcttgatctgagagctcgccgaagcctattccaccatgtctcatatcataaactccttccagcaactagaaaaggttcgtaccttcttttgattccctgcatgggtttatgtcgttatatggtggctgtgaaatttaagaaggtaccttaaaaaggataggttgagttgaccccgctgattttggtcacagttgggtgaaggcacctatgcaacggttggtatccccgagaagagtttcagtctttctgcaagaataccattcatgataagactaggtctacaaaggtcggaacaaccagaccaatgagctggtggccctgaaagagattcatctcgatgccgatgaagggacgccgtcgactgcgatccgtgagatctccctgatgaaggagcttcaccatgagaatatcctggccctgtatgacgtggttcatactggcgaaaatctcgtgatagtgtcggaatacatggacaaggacctgaagcgctttatggacgaccgcggtggcgctcttgatctccccaccctcaagttcttcgcataccaaatgctgcgaggcatagcctactgtcacgagaatagcatcttgcaccgggatcttaagcctcaaaatctgcttattagccgggatggagatctgaagttggcagattttggtctcgcccgtgcctttaatatccccatcaacactttctcaaatgaggtggtcaccctctggtacagacctccggatgtgctcttgggaagccgctcttacgacaccagcctcgatctttggtcagcgggttgcatcatcgccgagatgtataccggtcggccgttgttttcgggaaacgcgaacaatgatcagctgctcaaaatctttcaagtgatgggcaccccgtctgaacgcacttggccgggtatcagccagttgccagaattcaagcccaattttcctatctacctgagtcaagacctgcgactcctgatccccaggatggatcctctcggggctgatctgctcgagcgcatgctgcaattgcaacctgagctacggatcagcgccgctgatgcgctacgccattcatggtttgacaatcttgtttctgagacagggctatcaacacgcaacgttcctatgattgtttagatttccaatgctgctaggtacaggagaacatggtgaacccataataaagagtgagggcattacgacgtcaggaccatcatcaaggacagggggaaaccaggcttgccctgagtgtatctacaattgaacactcgagacatgaaacgcaatcttcatacaactgaaggctgatattgatacttctcatccaatatcttcccaaagaattgtacactcttgccagccaacataatatacttcatatatctagttcctagatcataatgtcgagggccacggtgcctggctgatattctgaaggtattaattagtctcacggtcgatcttggatacttagcaagagtaatcatgtttaccaggcagcctgagaactagaatacattgcaatctaccatgagtttcagtacaacatccattggacaatatttataatattctgcatatgataggctacgaaaccaccggggtcataacgccatcataagtcactgaatcgtaatttggatataaatcattatttaaaaacgcctgccagttcaaatgcatcttgggtatcgacggaatgaggaaaggagatggccataacaacagaatgcaaatgaatgcccgcaaaatcaatgcccagggtaaatcacagataaaggtggtacatagccgtcgggctacttacaggtttattacaacctgcaacttggcaccttgagaacggctttgtctttgaagctgcctttttagactttgagatggaccgattcccagcgcattcgccacaatatacctgacaaaattgttagtctttgtcacggactcatcagctcaaaatggacaatactcacatggccacatggttttgcaatatgaatctgttgttttagcccctctccggttcccaactcgtcctggcagttcggacagataggcacgtcatcttctgccaaaaggcgagtgaatccttcgggtgctggacttagtcctttatatgatgatcgaggctggggcgccggctgaataggcggataaagaaccgcagagtgaagcaaccccaagtcactcatgccattggcacgatagccggaccatgtcccatcggatcttctcggccggcgtgtatgaggagggaagtgcattggtattggaatgccattggtgtcgaagtacctgggttctattggtctcggcctgagggtagaagacccaacaaactgaacatctccactgcccggcgagacctccgcttccagatcgattacagcaggacgatcagccatggtggacgtgtggttcatcaaatctcccggaaatcgtaatggacggggggatgtgaagggaccgaatattgatgtcacattccgatggggaggagagtctgggtcgtttgtcaagtcgatcacggcattatctccaggtgaaagcatcaccggccgtcggtagtcgaatccatctctatctcttctgggtggcaaccgggaatcagatcgagcgtggtcggagcgacgtgggtgaaagtgctgttcccaagcggcatcaccgcttccatcatcttctgtggccatctcacgatgtcttcgctgagagagaaagaaatcttgttagctaggttcttaatgatctgatcgggtgccccgcccgtttcacgacggatgaaggcttaccttggttctggcgcccataaactggacgccagagttttcactcatttcagggcctattcctgaagtcaaggaatggtattttgcagagaaaggagaaattgaaagccaccagggaggtgagagagcaagattggaatccatctttgtgtctaggccgagtcgcaaggcggtgaacttgtgccaatgttataaggcggtgtcttgattagtgagctttgaggttgagggccgggaacgcattccagaattgacaagacgaactggctctagcaacagatatttaactcatttctgtagggctttgttgctgtctactattagtattccacaccaagtttcatataaagattggaccaaatgaaaggtatgaattcacgatgaaatctttcattcatctctaaatttacctgtgaaccttggaatatcatctgtgaataccatctgtgaatatcatcgcaccaagagctttcaaatcaaacaccatggaaaattcagaaggtcgcatgctctaatattacagtattttcctggtgatcatgactgtgcctctagcactgtgatcacacccgcctcattcaacgtcacaatactctgagcagctgatccccaagcaaccgaggtagcagggaccgcactccgcagaggctctgaccaccccttggaggcctttgagtattgctggacagttactccgctgggcccaccagtcaagaggaattggccagtataatcccagaagattgagtctatctggcttcctgtgtccagtaccttggtctccttggagctgcggagatcccagattgatacagtggtggactgcgcggctaccgcagccaggtaagtaccgttctcagagaagaacagacatttcactgggcccgacatcgtatagtccgcagcagcggcgccggtcttgacatcgaagatcttgacttttccgtctgcgccaccggccgcgatcaagtgaccatctgggtggaagttgacagacagtagagctgaacaaaagtgattagcatcgcgcttggatatatgagttccataggttgacttcttacctgcatcgcagaaaatttgggagaccacggtgttggtggcgagatcataaagcacataactcttatcgacaccaacagaagcagcaatatcaccagtagcgtggactgtgacagccgtcacctcaccagagtgggaggcgaagcttgcaacttcagcgccattctcaaagaccttgacggagcccgtagaggaggcaacgacggccttgtttcctgcccatgtcgcatcggtgactgggccatctgtcttgagggtctgtacgacactcttctgggagagcgagtagacaccagccacgccgtcaacaccaccaacaagagccaggtcaccagtcgggttgatagataacgcgcggccaccggggtagagaggttccgagacctgagatggcttaaatgtggaaatagcctcacttgaggcccagccctcggggactgcgcgcttacgtcgggtctttgatagtctgtccaataattagtcgtctatccagaaatgcgatggagaagcaccgaattcacgtacgctgcctgtgtgttctcaattcgctccaacactgcttggggcaggcccgtggagtccacttgcatagcctctcctccggcgcgagtggtaccaacagaaacgttcgaaagtgcctcgcgggcctcgtccctctcctgcgtcaggcgcgcaatcacccgcaccgcggcatcatgctgatagagtgccgaacttagctcgcgccttgtctgtgccaaattctgctgcaaagtgaaggtctccagggccaaggcatcccactcttcttgaaaaacgctgagcagagacgggatggatgtaagagtagggggtcgaggtcggacaacgcgttgcgacttgagatcgatcaaatcgtcggtggtaagctcctcgccgttcacgggatctttgccatgctcggcaatgtatgcttcaataaggcgcttttcaaatacgctgcctatttaattatgagattgatgtcgtgcgcgcaaggtgatttcgaagacttaccgctcttggtagagacgacgggcacttgaggtgcttctccggagactgtgagaaaggtttagtgaggaactcgcttgaaagaagagcacaaaattgcgattcatagtaggctactcactagcacaaagcatagttaattggtattggttgatgagggttgatggacaggacttgacgcgaaacggctccttggacttttcgatgtgtcctattatggtttagcgtcttgagctgagggcggtgtagtagggcggaatattgcgaccagcagtgacgtaagtccggcgaattttgaccggcagaaaagtacagtccttcccgtgataggtacggcgtagaggggccagagaaataggcggtgaggcttaggaatgtatggtcgcggtagcccgccgtagaccagcagctatcgactttcacaattctccaattctcgcttttgcatatagagataacttatctttctatttcgattgaacaaaatggatttccctcgatgatctacagaataggcaaagggcacgagtacaaagcttcacttgaaagctagcaagcgaatacagcgagcgcattcccatcatgcctaagaacccaaagtttgaatatggtatgtcgctttgcacctctctaacatacctatttgattctaacctgttatgcagatgcaaagcagcctgcatttctgcagaagctccggggccagtatggagacggcactggtcgcttggagcggccagccttacgaccgaccagactcaaggtcaataatgacgacgacgatgacgagcctacctacctcgacgaagaaagtaacgaagtgatttccaaggaggaatacaaggcattggttggtgaaagtggtccgaaaggagaggacgaggccggcgaatcagcgaaggacaaatccactggcgatcaagacaaatcccaaacagaagtttctaccaacaaacagaacaatctcactgaggttggaggtcagaggaaacggaaaaaggccaaagtggtgggtgaggacaatgccgaggccgaagaagtccttcccaaggcaacttcgaagaaatccaagaaacccaagaagatcaagctctcgttcgacgaggaatgagagtccagcaaggctgagaactagagtattcctttgcgccacgtcgtgggtggttgactcagtgtaaagcatcgaggactcataatgagtcaatagaacggattacacaacggggattgtataccgtcataggattagagactgtcaaagtcaaagtcatatagaagaatacatactaatgccagtattcagtctataagataaaaatccatccagttcaaaataataattcaagtgctataaaaggtctgggccaagggcgcatctttatccgcaactttttttgcaacttttttttctctctcacgggatccagtcgccttccattctttttacaaacaacctgctcttggtctcagtatcagtcaagatgcctgttgtaaatgtcgaccagctggtccgcctacagcggaagcccgaggacataagaaatgtgcgtgtgcccctccatcccactcatatcagggctttatactaatctcagccaccagatctgcattttggcccacgttgtaagtcaaagaaatttacactttcgttccaaatgagcctaaaatgctcatcgcgctttcttttgcatttttaggatcatggcaagacatctttgacggatagtcttattgccacaaatggcatcatttcacccaagctggccggtaaaatccgctacctagactctcgcccagatgagcagcttcgaggtattacaatggagtcatcagctatctcactgttcttctcgatgctccgccgtccaagcccggacgcagagccagtgaccaaagagtatctgatcaatctgatcgattcacctggtcatatcgatttcagcagcgaggtctccaccgcatctcgtctttgtgacggtgcagttgtgctcgttgacgcagttgaaggtgtttgcagtcaaaccgtgacagttttgcgacagacctgggttgagcagttaaaaccgatcttagtcattaacaagatggaccgcttggtaacagagctgaagatgagcccggccgaggctttctcgcatcttagtcgactgttggaacaggttaatgctgtcatcggtagtttctaccagggcgagcgcatggaagaagatctgcagtggcgtgagcgtatggaagatcgtgtcaatgctgcagcggctcgggaccaagacaacaaaaagacatcagctgacgatgagtctgcacaaagcatcactgagggaactgaatttgaggagcgcgacgacgaggatctttatttcgcacctgagaaaaataacgtcatcttctgcagtgccgttgatggctgggctttcacaatccggcaattcgccgccatttacgagaagaaactcggaatcaaacgaacagttctggagaaagtcctttggggtgattattatttagaccctaaaactaaacgcgtcttgggtgtgaagcatctgagaggacgtgctttaaagcctatgttcgttcaattggtcttggatagcatttgggccgcttatcaagccaccacaggtggtgacaagggcaaagggtaagttgaaaacgaacccaactatcgcgtcaacgctgatatgatattgacctttactagtgacccagtgttgctggagaagattaccaaatcgctcaacattaacatcccggtatatgtcttgcgcggacgcgaccctaggaacattatgaatacactattctctcagtggctgccactatctactgccttgctggtttccgtcattgaatatctccccagtccgcccgttgcgcaagctgcccgactacctgaaatgatcaaaaagtcccctggcgctgctttcattgccgacgatatcaagaccgccatggtggaattcaagacaggacctgaacagcccgtcgtggcatacgtcagcaagatggttgccatcccggagagcgagcttctgtctaatagaaagcgtagcgaaggcgccatgactgcagacgaagctcggcaaattgcgcgtcgcaagcgggaggagattgcaaagatgcaggcggaagcccgcagtaatggagaagcagatgactttgatcgtatgacatcgatttttgaaaccacctcattgatcactgagacgactgaggagccagaagagccagtggataaggaggacactgatcatcttattggtttcgcccgacttttctccggaacgctttcggttggagatgagatctatgtcctcccgcccaagttctctccagccaatccgcacgccagcccggagccaaagaaagtcatagtcacagacctgtacctgatgatgggcagagccctcgagcccctcaaatccgtaccagccggtgtggtattcggaattggaggtcttgcaggccatgtgttgaagacaggcaccctctgcagccgacttgatggaggtatcaacttggccggtgtttcgctgagcatgccgcccattgtccgagtcgcgctagaaccggtcaacccagcagatctaagcaaactagtcaccggcttgcgcttgcttgaacagagtgatccatgtgcgcagtacgaagtgctgccgagtggtgaacacgttatcctcacagcaggtgaactgcacttggagcgttgtgtgacggatctgcgcgagcgtttcgcccgttgcgagatccagactggtgaggccatcgtcccctaccgtgaaactattgttcacggccccgagatggctgcacccaagaaccccgacctaggacgtggagccgttgtgacggtctctgcttcgaagcaaatgacccttcgtctgcgcgtggttccgatgccagatgctgtcacggaattcctgactaaacaggtcggaactatcaagcaactccaattggagaagcgctcagaagctgaaggcaagatagagaccgagaacgcagccgaagctgccgttgacggtactggcgaggcgcctgaaggcaacattctctccaagcaggagttccgcgaaggtctagagaagttgttcaacgacgaggtcaaggaagacaaggagctatggaagaacgtcgtcgaccgaattaccgctttcgggccccgcagagtcgggcccaacattctagttgatgcaactgcagtcaacacatgcgaaaaattgtgagtataggttaaaagaaacactatatctatcatttagatctaacatctccttcctagcttggtcgatgacaccaagcaacagatcgacggtgataaccaccaggcactggtcgtgcgcgatttcaacgacaagatcgcgtatgccttccagctcgcaacaggccaaggtcccttgtgccaggagcctatgcaaggcgtggccgtgttcttggaagacttatctgtgcagtctagcgcaggtgacgagcttgacatgggccggttgacaggcgagtcaatcagactggtacgtgaaggtatctcggccggtttcctggactggagtcctcgtatcatgctcgcaatgtacagttgcgagatccaagcgaccagtgagtatttcattcttcccttctgttcatgccttcacaccacacgcgccacacgcgaaaagcaaacccacagctaacacatcatcttcacccttaaagccgaagtcctaggccgcgtctacgccgtaatcacgcgccgccgaggccgcattctctccgaaataatgaaagaaggcacgccattcttcacgatcctggcgcttctacccgtagccgagtcgttcgggttcgccgaggagatccgaaagaggacgtccggtgctgcgcaaccgcaactgatcttcgcaggcttcgaggctctcgacgaggatcctttctgggttcctgctacagaggaagaacttgaagatctgggtgagcttgcggataaacagaacgttgctaagcggtatatggatgctgtgcgcaatcgcaagggtttggttgttcagggacgcaagttgattgatgcagagaagcagaagactctgaagaaataaggccggggtactatttactctggtagagtccaaaatggaagatttatttgcatttcatttggggcttttttgtaggatggacatggatgatatatggattggggatgttactccgaaaacatctgtcgagtcgcactgagtagacttggacacgacagatgaaaaattggaggttcacagaagatgagagtcctccgcgtgttcttcaaagaaaaacatcaatctccctcacttgacaaacacagtccgacatggcataggtctcgaccgtgtatactaaggagggttacccaatagggtctacgagtagtggcgttgacgcctctctacttagaaagaagaggaaggagaaaagcgacgacaggatgggagcctgcagtcgagagtcgaaggaaaggaagggcggaaatgacatagatttctcaatcatgtctccgttgggtatctttattctgaaatcgttatcaatgtcaataatacacatatctgtgagtgcacagtggcgtaattggatcgattcaaacggggaaaggggagcttttcccacttcgtgaaacatgaaagtcgtcatgatcaacccgggtgctgctgcttgagagcatggaacaagtgtgggggtttgaaaggcattcctcgcagtgaaggttgggagtgaatttttgctgaaaaccatggatcccggaggtagaaagacaatgctctcaggggatgagcagatctgccacggacatctgggtggacgggagcagattctgcttgattgttgtaagctgaaccactgtgtggccagttgacagtagaggaaagggtcatagccattggacattcaaagagaaagccaaaagccagacaaggaggggaccaagttcgaacaattacatgttcagaacggcctggcgaccttcctctgctcactagttccagtgacaggatctctcatttccttccagctgacagggaacatcatgttgccagcgtcactgcgagccatgacaacaccgagatcattgcgtgcagtagtgatgtagtaaaagctctgatcgccaagcgagataacggagccgcgaacgatatcgccgacacggaacatctcatccataacgacacggtccttctcaacagcccgtacatcctctttccggataagtgcctggaagcgcagttcgtcggtgctgctgtggttttctgggttggcagcagatgtgaggatggaggcgacattgtcattgtctgaggccgttggtgattggccttgagattgtgctgctgattcgtcgaggacgacgaggatagaaactgtagcttgtcgcttctgtacacgggtcactcgtgcaagaacgatggagtctaccgcggggagggtgttatagcgaggtttcgacgcgattgagggtacgacgacgggaccagccggggttgagcctgcttggtctttggaatatatcactcgtgaaactctgagggtcggtcttgtttgtgacttcggctgtgcagggtccgcaatcacaggaccggcgatggaggcgtagatgaaggattgctgaacgtgtgtgccgggacctgcagaatatgtggataaagggccgaggcgttgcccaggaatagcaataggtggtagagaagccatcttgcaaaactggagttgggccaattctgaggtaaaaaaggtctggagtttgcaaaggcagcgagttttctggagcttttttaggagctataatacggcccgggtttaggttattccgataccagcttatccgcatcgactacggagcacagctgtacattcaaacactatgaactacattattcaattacaacttgtcaatgaaattctgtctgcggggaattaattacagagcctatatctagcatgaaatgaataaacaatgtacgcttcggaacaacggcaccggcccagaaataccatggacatataacaacagaagagataaaagtccgtatcactccgaatgcccactgacgaagacgaataagtggctttaatatcatccaactaacggtttttgtacgttgtagggatatagtctggcagattagggaggtctacccatcataggaagcacgtttttgcgcgaaacaatcctaaccgcgaatgggatgatatgaattatgccaaataccaactagtcaagccatctaacatagactagaaggatatcactcgatgggagtggtgaagcaccactcggtggcagggtcaaccaaggaaatgtaacgagccagtgtgatatatgtgatacaagttgaacatctttggtctcatttcctttgcctttgctgattgatcatgcgctcgatttcggtggctgcggggccagatgctttagtgcggaggagttccagggtgttaaggtccttagtcttttgtgcttcttctccggccttcacaatcatgccgcacttcacccacatctcaattctctcagcggggggcaagtggctgcactttggcacgaatcccgaagcaagttttgtgtttccagcacccaaaatctcgttatagaaaggctgtcttgtgtgagcgtatattcagtagttaggattattgactgtcttacctcccatccgattggggatttcttgagtttagcgatttcctccagttcgccccagtcacgcttagccaccaaagctctcagtctcaaccaccagaaagttttttcaggcattttgaattcattttggatcttgtgtgctcttttaccgtaaccacctcggataagtctgtagactgtctcgttgacactaaggccaaggaactcgctgtggtctgccaagtctttatccaatgcgtcttgggctttcaaaagctgggaggcctcagagactagtttttggttaagtaccactgtcggttccttagaatcagacaagaggcgagatgctagctggagtttttcggttcgtcgtgtcagatctgtatctcgtaaagcttctgacaatagtacattagcgccatcaatgggtcgatcgtcttggtagaacaggtctttcagtagctcgatgtcatctcctcgtgcagcagtttcaacaagtgcggaagccattgggcgggtgttgatcattcggaagaagcttgctaaaggaagcttgctcttcagatgcagaagcacgtagttcaccaagtcatcatcaccactctcaattgccttgtcaagagcaagctcatcttcctccatattcaaaagcagaggtacttgcttgccggcccgtggctcatgattgagcaattgggtagccaggtgagatcgaccctcgtcataagcagcttgagcgataacctcaaacgagattcctggcttcccatcgagtctttggacaataagcttgcatacagcttcgtcatcaacggtcgacaccttcaccttttggcttgcccagtggacatagattttgtctgcgggaatctgtaggtattccgaaatccttattgcaagcagatattcatgtcggctgattaagcgttcgatgagtccttcgggtgtgaggcgcaggtattgttcgtatgataatggtagcccgatcttatagtctcttgatgctttgagaacgcgtagcttttcagtcatctcaacaaactcatcactgttgtacagctcgaggacggatttgccaaacgaggcagctttcagcaggcgcttctgccagtaggcgtcgaattcatggcctgctgctttaatgcaagtgtcaactgctgatggtaaactcgaccggatgcgctgaatgttctcatcagccttgggcgattttttctccagttgctctacagaatccagtagtacggaagcgggagaagacgacccaagacggaatatttcttcggtaacagctggaaattgtcaatgacagtctgcctgtctccttttgatgtcaacttacctgcgaccttatgcacgaattcgcatgtgtcattagttatgagccgaaccccatcaaactctggtatgacatgaacgcggccatcgtagtagtatctaaaatgattagaggcgttcgtatatattacacaaaagagaccacttactttgatgcgactccgttgggcccaacaagatgaatttcatcttcccatccaaggatgacagcatcctcgccacaccaattcacggtatttggaggaacccgagattttgaatcgtactcgctgaacttgttctggaagtcattgctgactacccataacctcccttctgcggtgaaaagtgcgacaaagcgccctgtgggggacacactaatgtgtttgaatggaccatcttgcagaatcttgtcttctgcttccgttgagtcgattaaaaatacggtcttgtcgacagccaacagaacctcaacggatcgtgagagtgtatgggctggtggaattaaagcccatgatgatacctcgccttcaggacaaggtgccaagagtcgcgggcgcggctcatcatatttagacacggcaattagctggttattggacagcaatgcaacaaggcctgatgaccaaaactggcaggctctcacgccatactcttcggcgccctattgaattgttagtttgtgcacagtatagctagggtaggcagtcctaagtctaacatttccgagagaaaaggatgtaaactcgccgtccaatccgaagtagcgtcgcactgttccgtcctcagagacgaccaggagctcttccttgtcagaccagcctagtccgcgaatagttgcttgttcccactgacacaatttagtatattcatcatacatcaatcataaagtgcaaacaaacgtttatacgattgattttccgcccagagcatgaataaatatcaatggtggaacgggagccctgtccatcgcgaagtctgaatgtcttactttcgtcgcgatagagcgctgattttcacgttagtctagatcttcggttctctaatagagacttaccaatagctcctccgtagggggcgcccacgacaatgtagttctctaactcgatgtcgtcctcgaagatggcgtcatacacggcgattttgcgataaaagctgtctccaactttttcccagtttgcgagtggattgggtggcatgactgtagatctgatcacagatgaggcagtgaatcctctctacctgggttgttggatgttccagctgttgatccggagaatgggtcgcgcacgctaggcccgatcgggtggtgttgtggccttgattatcaggcggagattccccaccacagtcctcaacttctcttgatacttgctccatcttcattggccaacttggtcctcttcttaacatatggattatacagatcttgctgatattgctgatattgctcaacaactatctgaccttgaagtggcccttttactatgccttgttgcccgcgaacattgcttgatcgagaccaccagccactgtattaatgaccttgccaaagaactcgccttagtatgtctatgcacccgggatattgggatggtatctgatgaaagacagattggctcaactacattcaattactcatactgcatccttgactgttcaactgcaacatctattgacgacgtctttaatgacgttctcaccccggatgcacgcgcaaactatcgcccatcgcgtcagtggttgaacaccgaatcagtatgttgatattttgaatgctttttgctatggatatcgttgtatagactaatcaaattagtcaagcaaacgttcttcctataagagccttggggattacagcaaattaactccattttcacaactcggcagtaacgttgtcaatattgtagtcgccaaaaacttcaattttgtcagcgatgatatccaaatgcacatgctgcaggtatctattctgactagcagctcaatggagccgatgctgatatttgcgatagttaatgcgatcgaaggagttggtcaccgagaacgggaccctgagtgcgcctgaggacttcctcttcattcctcttgtggcacgagatttcgatcagctccggccatctttgaaactacatctggtaagtattatttgtgcgtgtccgcattttgactgctttactttagctaatgccgcagtagaatgacaatctcttcatttctcatttccacagcccggatgttggatatacctatcttgaagagaatgactggctttcagatggacaaatgtcggcttcctctgtcattcataattcaaaaggcaagcaaacgaagagcgctacagtcagtccgttggtaagtttgatgatttagaatacgaactgaacatagaaatcgaatactgggctcatgaacttacaggtggtgggtcaacttcgagaaacaagtgcgtcggtgagcacgagcgcggaagtcgttcgatacatccaggatatcgttgtatttctgcggctcagtcgcgctgttgcaggtggtgtgtctgcgaatgcaaatattcatttttctcgatttgcacagtgagttcgaatgtttccaccaccacctattacatctagcttatcttactggttctcctctgcagacttctagctcctctgcatggtatcgattatttgactccctccatcgtggccctagccgccaggaaagtctttcgccatcgcattattgtcactcctcctggcgaagaccgcagtctacagtatgggagtaatttacgtgcggtagctgatattctcgttgatgtgacaccggattcgatactagatggagttctggcgctggagccgcctttatgagattataatgcacctgcttagccattctagattactgcattagatacccaatcaatatagattcccaacttgtgtgcctctaatcatttgctttcgggcgagtcacatcctactttttcaatttcagtatctgtgcctacagtggaaccagcaagactcaagtcagcttggcgaccatggttttatttggtccataaagaagacagcttggaccctctagttcacagataaatcgatgcttctaatgctaatttaatgctatacatgtaataatcgcgccagcaatacaccgctagatattctatattcaaactctcacctaccagtactcggcttcaacttcaagaacaagtctgggggtgtatacttcgcgtccgtccttccgtttccagattcagttcgaccgggcgttaaacatagatcaccatgaactgcaccaacgggctgttctctgaatgcctccatggccttcgaatgcctgcgccactcagacaaaacaacatcgatttcagtcttggagtcaccgacaatagcatccatcttgatgtcatttctgtcgtagccaaaggggtcttccaactgcgagcctattccttcaattccatacaatgtgaagataacaaggctaacaattgggatggcccaccatcccatctcatcgaccatagcgaacggtaaaacacagccaaacagggcgaggacttgcttttggtgaatcctaatttgagtcagtatttgaaatataaaacttaactcgacacgcattagtcatgaatcttacaggtgagccactgggatcggagtcaacttgatcgtttccatcttcccgtatgcatcagtcaaggtattcaactgagcctgcatctgactagcgccaggagcaggataccacccacgttcttcgccgcgcttgataaacccatcaatgaaaaaggtcaactggaatggaaggcctaatccctcagattcatgaccctcaagacccgcgggtaacaagttggcatattcggggttataaagggtagatggatgtatgcccaggtcctcatcgacggagttaccaaaaacccaagcagcgccccattcggcgcgtagatggtttttcacggcgtacgggatagccatgagaatgcggatagtacgctcgatatcctcgcgctctgcggcggtgggcggtccccgctttgaattgtagctatttgttgcgatcgtgcggacgagattgcgcacgcatgtattaagtgtgttcattccgttccgtccgtcccagaatcgattgtaggatgtttggttgcggaagacaagcatcagacctacgacaatagataaagatgggatctgtttttgatatgtttagttgctgtctcgtcttattggttgggggtacatacgatagtgctaggtagaccaacagtgtcgaatacgaaggtatccaagtaaacaatcaaggctgtgaacaaagcatgcagaaggaccgggactagtatggcgccatgaattgcacctttgataaagcgaaaaacaagtggccatctgctcgatattagctcatgcggataattggcatataccgattagatagctcaccttcttggctttgtccgtgatgacagctgatggggatgagtgccacgccgttcatgatgaccttgtattgtagtgttttggcggctcaaggtcggagtgggcggctcgctgaaatttaacctcatgtttagatttcgaccgatacagatcaatttgttgaggctgactcctatccttaaatcccgggggatggtggaattcggctttggtatccaaccaagccctgaaatccgggggatattgaacttgggactaggatggccgtcaacattccaaggttgaaagcgggccgaacccacttgccatttctagcgccgtcaatcacgtgacggcatatatagttccatacaacactagtatgtagttggctatgttcattgtagaaatcctaatttattcaacctctcttgtgacaaggcaaatacaattgtcgggaaagagtccatttgactgaagtggaaagaaattattatgaattaatgtagatgtagaacgatggaggactggtgaacaaaccaataccagaagctaacaggactcagacaaaaagataacatgaaacaaaacacctctccaagtatgtatcctgctatatgttacatgatcacgacaaatgggttgctaactaagtgcacaaaaccgggaagcgaaatgactgtacaggaagtggcccttctggtcgacaattagctgttgactgagagagaggacgagagattgaccaggtggcaaagatccgacctgccgtgggcagtgagggtgcctcagcaaaaggtcaactgagaaatgaaggaggaccttgattcaaagatgccaagtagactcaaccgagaacaaaaacccaaaggatagaccaatggaaattgcagaaacaacacattgcgaatgatggacgtgctgatcccttaagtagagatgtagcagcaaaggccctcaagtaacgtatactttttggtgtggtatggttccagtatacaagatagtgtgccggatgcgtggtcatcgatctagggcacccgtggactttcagctgcgggcgacatggaattgtcgtattgatcacaccatcatggtgctaggttgctggctgccatggcctgtcagcaaccagatgagattgtcccccttgttatagaccaaggtcgggaagtaaagaagggcccagaagattaaggttatgacggtcgaaacgaaggcattgacgacgagtttctcattggatgtcaacacataaaggccgaaggtcacttcgtagcggtagtacgcgagttgcacgcgatcagaagctcgttgaaaaatgttgcatcgtggtttgcgccaaggcgcgcttgatttcatgttggaggaatatttatcgaggcattcattcatggccgctgggacttgcgacattagagaggtcatggggtcggaaagggactcattttgggtcgtcatcatggccatcgtaacgttttcgccaatcgtacacaagtgatagacatcaacgttggcggtagtttggctccagaagtaggcgaaagtcgagggtgggtgtgaaagagtcgcaagagaaccacgtaggaacgctgaaaggtaaaaagtcacaattggggccggcggggtggaaatataggaagggaagggaggtcacgatccaagggggctggctacaacgggaaaaggcggaaacggagtcggcaccaggcggaaagcaaagagtagagtcattagaatatacaacatggatatattggacatagatacattgtggcaaaaactatctattctagactatcctagctagcttagctcaacttggttcctcaagagccggtacctggatcggctgtatgtggaagtatacactctcgggaacttccaaggaatactcgaggaaaagccaattagggttttccactgcgtgttttttgtgtccaaagaacggtaatcattgaatcggaagaatccggacgaacccggtgcccggtgatgaagtctagatgtgctttaaggaaagctgaagtcaagtcacttcgtacagagtaccaaaagaaaacctgtttctccagtatagaccttcaacatggcggatgtcccggatacggacggccggatgtggaaggtggtcctcgaaaagcggtatcctgtggagctggcaaacattcttcacctcacgacggagtatgtatcctcgtcaaatggatatcctgtgggttcgagaccatcagagagcacgtttttaattggttgactatttggctactggcatttaattcgacaagcagaaaactagaaaatttttatagtttcacagggctagccctgcccgagtgtaaggctacttactgatccttacgtcaagccctgtcagaattcttgctgatctatgaaagtagtaagaaagccaagaagggctaagagtggcaaaattaggaggcgccaacctataaagcctaacccaacctactagtcagttttaggtccagagtctaaactccctaatcattggtctgtcaaacctactaaatcgcaaaatatatggtatgacaactatgtatatgatttaattctaggtattcatacaaaatatagggtataaatcatgaaccaatgaaagtgcagctgtatgagggcgaatctgacgtcttcacctgatatataaccttggaaccccgagttctgacagacaaaccctttcaaatttcaaatcaaacatacagttggtatcgtaatgcaaatcctagtaatcacctgcccaagcggcaaacaatgctctcatctcatccctctcttatacaatgaatccaaattcaaactccgtctagcagcccacacccccgaatccgcctcccgtctccaaaccacctaccccgaagccgaagtacaaatctgcgacaccacctgcctggccgaatgccgcaagcttctcagcaatgcaacctcggtctaccacgtgggcccatcgctccactcccgggaaatggaaatcgggatcaacatgatcgacgccgctgtcgccgagagtcaaaagcccgacactagcttcaagcactttgtctattccagcgtgctcggcacccagcaccgaaacctcatccaacacgaccacaagagccgcgtcgaagaaagactgctactcagtcctctgaacttcacaattctccagccgaccaatttcatggacgcgtacccggccgctgatctcgcgaagatagagagcccgtctatcaagtatgcctggaacatctttaacccgcatgtggccaatagtctagttgcgctcagggatctggctgaagccggggcccgggttttgaacgagcgggaagtacactatttcgctcagtatccgctctgctcgacgttcccggtgtctgatgtggattttgttgatgtcattggggactatattggtaagaagatagaggttccaactccgactcttgaagagggcgctagcaaggtgctcaggcttttatatgccggggaaagcggcgtgtatagtggggatcatgtagtctcggatctgagatggccggccgcaaagggagatttacgtcctgatattacaagggacgaggctgagaggctggttttgttttataatcggcgtggattgaaggggaatcccagggttttgaggtggttgattgggagggagcctacgactgttgctgagtgggtgaagattcaattggcagggtagttttatctcagctagctgaactatcataggcaaatgcttcattgagatgatcatatactgtaagatgaactttcttgtttcaattgagaaaaaaacaggtatcggaactcccgtttctagtcgggatgccgatgtgccgatgaaaattttactcaagctgtctaaatccccgaaatccccggcatttccgaccgatgagagaaagaaacaaaatcagtgctgttatagttactccgtgaagcttccacttattaatttatgaattttgccgccatagccaaagccatcgagggaaagaggggcaaggtcagatgagcatctgacatcggacaaattgattactgcatttattctgcttaacgagaggattcctatggagcctccctcaatctctgcgggctttccagcacatatttcgtcatgcttccgatgtgccacagaatttgtgggcgagctttatctaacttacagagagtacgtcatggttctcggtttgtcctgtggctctgagacatgtggggtgccaagaaccggctagaacgacttcgaagtgtattccgtatcgcaggacctagcttgacagttaacgctggagattgatttatctgcccagatatctcctgatagcctggctagctctagaccctttcgagtatggttccgcttgtatcccacgaggtgatccgctaaaggtagagatctcgacctaataatgtagcgaggcaggaaaagcgatacgatcgagtagacaagtcaatgcgaacgtgttattaccgagtcataattaaaaacaatccgaaggttaacgaaagaatgttcctggttcatcagatgtgccgggattcaaaacaacagtccagatcttgaatgggtatcagtggattttggggcaggggatgaaggtaggagaaaacagaacgctgggccgccgcgatgaatcaaattagatggaagaggtaagcactatggaacgatgcaaacggtgtatatggagtgtgcacccggagaagccaacgcagacatgcttccttgcagtggtgatatcgcagaatgctcagatgatacccacagaagggtagatgccaaaaagaaggagaaatatgtattaaaaatgcccaaagccccccttttccagttattaggtctacccgaagcgacgcattccagctcggccatcaaaggccaaaggccccgagtcatttcgtggagtcatcgggttgtcgtcagatgttggcgtgtcggatcggacttgtgattggcgacgcgctggcacactgagtggttgagtcggttgccacccggggatgttgatagtggcgctgcgggcgaggtcatcgccatcggtgctggagttagggcctggcgagactgagcttcgactatcgtggtcatcctgtagatgcaggttctcaacatcgttggtcaggttttcttcagcaggatctcctagctgatcagatggtccttccgtattcgcctcggcgcttgaatgcgcctgcgtttcatgctgctcgccagaatcattggctgccctatatgctgccagttcctcctcttgtctgtcctccaactcattcgagtcatcgacctcggcgctgagatcggtgaatgcacggcagttggggcattggaacattgggtaatcgggggagtgaagcagacggctgatacatttgtaatgccagacgtgcgcgcaggctgccatgaacaaacactgatagggccgctttattatagttagtagatgtaggattggtcagggaaaatagaaaaaaacgaaccaagacagagccaaggcaaatcgagcattcacgacatcccgaataatcagcagtctcgcccttgcccaagtttttgataaggctttctgtgtttttgctggaattcttgttagcgtcacacgacactcgggacaataggtaagatcgcacttgaactcgttgggctgctgctgccacgatcgattacattcaatccgaatgcgaacgcatcggaaaatcatttcttctcctcctcggaagtcgatacccaactgcacgatatcgccatctttgatggagtacagacgggacaccatattcggctggctcaagcgcatgtggttcaaaaatgtaccggaagaactgccaacatccttgatgtgccactgtccattcacatacaagaactcgcagtgtttccggctaacgaccttcgacttgaaccccacgggagcatctgaaggctcggtcgggttggaggacggtacaccatcacgctccgagtatcgtccgacacgaataacacagctctctgatggtagggtccgggagactgggacgaaaggtaaagagggtctcgagctctggagggaatcttgataggggaagaaccgaatgatcgctttggtctccatttttgaaggaatcacctcctcctctgccggagcgctggtaggtgcgaccgcattgctttgagcaacggcgggttctgccggttcgaccggctctgggggcgggttggactcctgcggggtgggctcctgcgagttgtttgtagaggtctctaacgtgcgaggtggcggtcgaggggcagccgaaacgctcatcaagcgtgccataggattgggttgggtatggtcggtcgagggcgtggaattagcggactcggtggatgatagttggctattgaggtcgctagcaaacccgtaactcggcgcgggcgcagaggtgtaacgagaaagaactggatggtcactttcagggcatggggaagctgtggtggagtttgtcggagagatggagtccggattggagaaccgccaaggaattcgactgctcaaactgtgtcgagccgagcgctgcccgctaggcgaggaggtcagattatgggtgtaggttcgtaaactgaagcggcgcaggcgactggggcgagggcagtcaggtaaggaggtggaggcggtgactgaagtagacatggattcgatttggcgaccatgaaagaatatcgacagagaattaaatagtgcccagagatttctgaagggtaacgtcactgggatctgcaactgggctgatgctattcaatggtttaccaggacatcatatgattagggtaaagggatgaccttggaacgagaagagatttcaaagcgatggaaagatggaagaaaggagtgaaggaaaagcgaggagattagaagagcgagaaaggcagggtgggatgtttcggccttcttgattgtatatactgtcttgtctgtcgaatctttgggatctttgctctttgccatcggttattaaagccctgacagtcagcatttcttggcaggaagatatctccccgcatagttaggatatataacgagagtatttatatgaagtatatggaataagtatatggaataatcgagagcgtataatagcaggatattgataaattactaaatccgatactaacgatattcccaagtatatacttatgcatatgtcgactgtcatggctcgtccttacttcatgtaccacgcatataggatagctaagtggtctatgctttcacataggcaatgtacatctctgtaactagttatgtactctattctgtactccctatatatcctatatgtgatctataccaaagcagatatcattatgtcgaatcaactagaacaatagctgaacaccacaggttacaaccttagatcttagaagatgtggcaaataatatatattaccaatgaacctgtagggcctgggccagttatctgtttgtctgacaataccctaactattcctatctacaaagtggcattccatgtgatacctgcaagtcaatctctaaccaccaccaacatgcccttatccatatgtgactctatctggtgatcatctgcgtcacttacaaaatcacaagagcaaaggtaatgccttcattggtgtatagtgtagcacggaccttgacgggacgctagaaagtacgctttagacggcaaaagacgttgaacccgactagataatagcgatgtagtgatataagaagtatttcaacatctatagagtaagagcagtgtctagaaatatgctgtacaacttactattattaaccagtagttgactttatatgatgcagttgatctccctttccggattggtcagcctagagcttcccccggggccgatgatgtatgtgctggagctggtgcgtgtgggaatgaaaatgaaaataaaacccatggaagagatgaaagaggagaacaaaaagaaaacaagtagattgacctagtcaattcgatcaatccaacccccaatgtatcctccaacacatagaaaagccattgaattccaagtttctgccgtaggagactagttcgctccctctcccctcccttaatgaaacacttgcaacttccttccttccagcatcaggaggcttccctccttccttttttctcatcacgcggctttttctttgtgtttccctccaaagcttcggctttattcaactcccttattttcaccttcgccgactcgtctttcgcatccctcacactcactagaccgcgcccgatgcgggcttgctagccagcatgagtggaatcgcgaatgcctgtctgtcttgcttttcagcagtggaccaatggtgtcatatcacagcatgtctcggtcccatcggagctcgttctcgagatggtatctacgaaacaaccctggccgataatgagcgagaagcggtatcagatcttctaggctacttggagaacgtacgtgctcgaccgattcatcattctgaaccactatcttcccttctctgaagcatagctggagactgggttcgcctgggtaccgccctgcaccgagcataccgctgacttccaattgtacagcgcgcagagaccgacttcttccacggcgagccactacgagccttgagtacccttgtttattccgaaaacgtcgacctgcaaagaagcgccagcttgacgtttgctgagatcacagagcgaggtgcgtatcgccatcttgctagcaatgatgcaagagctgaccttccgtcttatctacagatgtgcgcgaggtcgatcgcgataccctcgaacctatcctctttctacttcaaagctcagatatcgaagttcaacgggctgctagtgcagcgctgggcaatctcgccgtaaattgttggtcacgtccccgtcccgtcacccatcacccatctcctttcccgcttcccacacggtcgctaactcggtgcagctgagaacaaggtcttgatcgtcaccctcgggggcctatctcccttgattcgccagatgatgtcgcccaatgtcgaggtacagtgcaatgcggtcggatgtataaccaatctcgcgacccatgaggagaacaaggccaagattgctcgctctggcgctctaggtcctctcattcgcctggccaagtcgaaggatatgcgtgtccagcgaaacgcgacgggcgcactgcttaacatgactcattcgggtaagtggctctagttgattcgtctggccgtttctctaacatgaagaccagatgacaaccgacagcaacttgtcaatgccggcgctattcccgtgctcgtgcacctcctctcatcccccgacgttgacgtacagtactactgcacaacagctctcagcaatatcgccgttgactcgacgaatcgcaaacgactcgcccaaaccgagtcacgcctcgtgcaatcattagttcaccttatggattcatccactccgaaagtccaatgtcaagcggcgctcgccctgcgcaatctcgcctctgatgagaaataccagcttgaaatagttcgggcgaagggcctttctccactgctacgactcctacaatcctcctaccttcctctcatcttatccgccgtcgcttgtatccgcaacatttctattcatcctcttaacgaatcccccattatcgaagcgggcttcttgaagccgttggtggatctcctaggctcgactgacaacgaagagattcaatgtcacgctatatccacgcttcgtaaccttgctgctagctctgatcgcaacaaagaacttgtcctgcaggccggagcagtacaaaagtgcaaggacttggtcttgcgtgttcccctaacagtccaatctgagatgactgctgcaatcgctgtgctggccctcagcgaggagctgaagccgcatcttctcaacctcggagtgtttgacgtcttgattcctctgacaaactctgaaagtattgaggtgcaaggcaacagcgcggctgcgttgggcaatctgtcttcgaaaggtatttccccttatatttgtgtgtccttataagctgctaacaaattcgtagtcggcgattattcgatgttcgttcgcgactgggcagacgccaatggtggcatccatggctacctccatcgcttccttgccagtggagatcccacattccagcacattgccatctggaccctcctccaactgctcgagtccgaagacaagaagctcattggatacatttcacgatccgaagacatcgtgaacctggtcaaggttatctccgacaagaacatcgattcggatgaagaagatatagatgatggtgagggtgaagtcattacgctcgcccgtcgctgccttgagctggttggagctggtcctaagcagacccttgtagaagcctgaaccttctgtttcgtctggttataccacccttgttctcacccttgttctattttttttcggtcccttctgctgacgatgcttcctcgcaaacaaggtcttgtgtcctttgactgaatcgggattttcttttcttctctcattctgtcgctgaaagcgattattttcagaacttatatagcgagtaatcgatttttatgataacttaaggggacatagaaataaaggcgtttcgtcaacttgacaaccttagatggataagaagtatgataagctaggtatttgcactttcccctgctcttgtcgcaccaatctcaaccgtgagcaagctgggacgacatcgagacttgcacaagctggtacgttcttcagatctcacgcggtgacctcgctgtactaaccatccgtctttttacagaaatattctgcatcatgggcaagcaggtaaaatggattgtcgactactcgccagtgatccttgcatccaatgcctaagttggatcagacccagctaacacttcaccaactgtctccgtgaggggatgtttgtttcatattgcaactatggcgttaccccagggatcggtatacaacacactaccactcacaatgggtcgaggactattgacacaagtgggctgttcaggtgatctcgtcggtttcatcaacagtcgtagaatcgtcagttgtgagattggagtcttcaatggtttcaatttggaagacattctttgcgacagcaatcttgggaggtgcagaatcttcggccatcacatcatcatcctcgtcatcctcgtcgtcgtcgtcatcttgttgaagagcgttgaacgccatggttttgcggttggtgtcgtcccaatcagcctaattaaacgtgagcacctgtacatcacgaaacaaccatctgttttcatactcttcgggagttgacggtcttgccacgagccatgcttttggccttcttgatttccaattgatccatcacggcctcggctcggtccattcccttttgttgccttaatcgctgggcccgtgaaaccttgtcattttttttctgctttttctggatcccggaagtcgcacggtcagccagaaccgaaggccttgttgtgttaggagattccgctcgtggaagcgaagtcaacgacttgtcaaggtcgagacttggggatgctgctctccgtgctgcgcgggaacgctgggactggcctgtttcgaatattagatacccaaacgtcaatgtatgcggcattcgtattcaacttacttttgctcttcgccatggttgctgttttgaaaaattatcaatctcgtgggatgagatcgctatcgataaaaaaaagtttacggcagacgaagacgaccaaaggcgcaccttttctacgcaaacatgtaatttgatgtccctttctacacgcgtcttgacactcccacgttctctgtcaatccatgctactgctcatgctggcagataccttttgtcacagatatacgtctggctttattgacaatgaacacccgcgacgtgcgctctgagatcttttccaaccgccccgatcagtacgcaagtcgcaacagtcattatgaaaccgccctgacgactttacaaaacaataaagcattagcatacatatttattgctcttatttcaatctgtgtctttctcggttacctcggacttgttcctatatcgctattccagctcccctgggatctcattgtctattttacaccctctcgaatcgttgtcgctttagaccctcaaatatcgacctccaaccccaacccgctagcctcggctttgtccttccagaataaaagtgacgcgatgagacgtattcttggcttagacaacaacgtctacttccctttcttctcccggtcaaaatcgctctctattttcggaaatgcgctgctaggaaacactcaggatgccacacctccggggctcggaaattggaacaactcgtgtttccagaacagcatcatacagggattggcttctttgaaatatctcgccgagtttctgggacacaacgtggacaacctctcggacaaggcttccgtctcgacgcacagggcactattagacctcatcgaccgtctgaatagcgcctccaaaagtggaaccaagctgtggatctccgggcctctcaagtccatgagtagctggcaacagcaagatgcgcaagagtatttttccaagttgcttaatcaaattgaccttgaagctgagcggtgttcacgcggagagactttgaatatgggattgaagatcgcgggaccggatgagaacatatttcgagacagcgactctaatgacccggtggtgtctgaggggtccgaatcgctctcatcgacagataagatttatcttgatagggtttcatcttgcaatcctctcgaaggcctactcgctcaacgagttggctgcatggattgcggatggactgaggggctctcgttgatacctttcaattgcctcactgttcctctgggcaagagattctcgtacgatgttcgcgaatgtttggatcaatacatggcgcttgagcctattgaaggcgtggaatgcgccaagtgcacgttgttgcgtcgactggagcagcttatcaacttgatcagtgggattgaagccgatgagagtcggtcagacagctccgacgaacctccacgatttaatgctgtgaaggagtcggcctactcgcggttagaggctgtcaaggaagctttgcacaacaatgatttcagcgaaaacacattagcgaacaagtgccatattaactcaaagaaccgagtctcaaccactaaatctcgacaagccgtcattgcacgggctccccgctgtcttgctatccatatcaaccgcagtgttttcgacgagtacactggcacgttggagaagaatctcgcggcagtcacgtttcctcagatgattgacttgaacaattggtgtcttggcacccaacctcccaacaagcacggcaacaattatgagcgttgggatacaaacccctctcggtccatgcttccccaacctggtgaatcaattcaagtccctagcagacaatatcaactacgcgcaattatcacccattacggccgacatgagaatggacactatatctgctatcgcaagtatccgacatcagaatttacagccccggcaccggacgaaattcttcaagctgagggtgacaaggacaagcccgagcgttggtggcgcctcagcgacgatgacgttcagatggttagtgaaggtcatgtgatgagccaagggggtgcattcatgctgttctacgaagctatggatgattcctcgccgcgttcgactcgagctgcaacaccagaacatgacctagacagttatacagagtctacccagttcggaagtgaagaatcaatgccaaagaacagctccacaccatctactgtcaccgactgcgaatctgcctcatcccgtgagaccagtatctcgttgccgatggacgacttgattcctgccgacgtgcctgtgaagatctcgaacgtgattgacactaatgctcaggcgaacgatgaactggactctccctctaccattactgcatgatcaccttttcttcatacgttttccctactttttgcccgcatagccgtaccggctactgcatcatgatacccgataccacgttccatttgaggcgctgatttgaactccattgtgtttgggagtatgtgtaaatttatgtactattatgaggaatctgaacagaatgacttattgaagcaacacacttgaattcgattcagcctgactgtaattccgtagactcatccacgactcatccacgactcattcattgtggattgcctccgtctcttaaaaacccagtcaacactcggtgatgcagccttggggttcatatccccgcatttagcacgagcaccttgtgaaaggcgacccggtatgatggcccggcatcacctcattaagtaccttggggccaccacagcataaaactacatgaagactcctttcctcgccaaattagatttgcaacttacttttctacattctcgacgagttctaccagcaaagtactaattctgacgtaaaccgaatctgcctcttcccatatcgacgctggaaatcgttgaagctgtactcgagtctgtatagatcccgtcggagatctccccgggtcctcatttcctatctgatcgtcataggtatgatatcgtctccaatatttgataaagctggtcgttcctattctaattgaacagaagtattctataacatcttcaataatgtctatcaccaaatcctcacagccgcatgacatattcctcgtcaacgagctactcgagaacattcttctacatacagatatgagaactctattaacatctgctcaacgcgtatctcgcgtctggaaccttatgatcaaaacatcagtccgactccaagagtccctcttcttcaaaccctctagagagatcccagatccctcacagcgcctccgcaatccgctcctagaagatatcctctgggcccaattcttcctcaagcaacaacaaacctcagagtcgaaaatcaccgaagtaagcaggtttccgctgcgggaacccgagcgtcgcaagctcaatatctacctgcgcaaagacgccagttggaaacgaatgctgcttcaacaaccaccgacatcatcaatcggagtccttgaaatcatcaaaagatcagactcggaattcaccaaattatcgaccagcccaaacgcattcctacggatgggcgatctcttgagcctcctccaaggaggtagcacgctaattccaacccgcaacaaatggataatgtggagcgggcgatcccgtatcaggatgcccttgaactttgaatgctggacacctaaatgggtatatgagccaagtaccctgcggccggtccatgaatggatcccggaaaatatagactgggatagtctccggctggaggtggcatcgatgtatttgaatgatttcgactgtggtgtggtgattgtatccgaacggagacaggtgctcttccagggtgaggatcgaattcacagggagagcaaacttgatcggcgactggagaaagtgtttggggggtgtcaggtggaggttggaaggatgcatatcaatcactcttggattcctatcaagggtgttggtgctgatcggagatgggttcttaggccatgttcggctactcctcttgttccgatgctgagtgactcggaggtttcagattcgtcttctatgtcttcggtttctttgtctgtataggggatatactcgaggctctgcacgggcgtatatcttgaccagtttgaagagatttggaatgatactctgctatagcatgctggttattgcataggaaagaaatgatacaaccgagagtcgccgaccgactgtggcctgccggggttgtttgttacaaacagcatcgctcttcaattgtatgcatcataatcacaatgaccacttcgggaatcatgatcagcctaggtgttaggataccttgtagtataggaaagacatagctgagcttagcttaagcgtcttatgccccacttccattcaagaatagtggagtgtttcatgattgctagctttgtcggcacgaaagagggcgttggagaggcagcgagatattccgaagcgaactatctggactccttcgagaccaagccacacatttcatttccggcaaatcccaacagaaggtcccgaccctcatctacaggtgcatattccaaagagccaaataggaaggaaacacaattcaccgccagtccgtctatccgacccgtgcatcggggataaccagccaggcaacgaatccatgccactttagcgcgaccagggttgtcacaatactataacgaccctgttcggatattggccagcctgtacgaccaggatgtttcttttgctgttgaaatccaccgtggcctctaagcgcagagcgtggatgtcagtacccagcgcagattgaaacgtcgatgcgcccgaagcattcatgcccggcattgcacaggaacaacggctcgacaggacaaagcgattgccagctaggccgaagtaggcaagtcgaagaattgcagcgaagacgcatcattacaatgctaatgcaggttcacggcctaccgcagtttctcggctttgcacatgtgccattgcgatgtgtcgaaacgttctcgaaaatggcaaccggaggtatatactgtataatgacggtatccgttggcggagacaacccctggatttcgtttctggtcgatgttctgttccgttttgggaatctcaaagcgtatattctactctgtattgtatacgggaaagcgaccgtggcgatcgcatcttacccggtcgcaaatatcggtcaagacagataacctctccaggctgtgagtcgatacagaataagctctgactcggagaagataaattgattggcgtcggaagagaggatggctggcttttgtatccaatcgcgatggctgctcgagcggtctcagagatagaccgtctgatcccacagccattgcaatattggcgttggtctagattggggcgactgtgctatccgtgcggatcttcatgcacgcacagggcgaggactagggaggcgttgattgatatgaaagttgatgcttaagcccccccgggacagtgccctaggacagtggacacgtcttacaccgtcaacccgccactgccatcaccacccttgtcgatcgatgcagtcgggaccgcggatggtgtcccggaaggatctgagttacttcaccgtgtagatactccgcagtgcttcctctccttcgacgatgtgctatctcacattcttccgaatccccgccagcggaatgtgggtcggatccccatggggtggatttgttttccatggttccgtgtctttagtgcccgcgtcaatggatgagttgcgtcggaattcgtgcagatctggaaatagcatcggctattaagtcggtgagggtgtcggaacggtttcattatcttagtgtctataaaagctcggctcttttccgagttgatacggagtagtgaatcagatactgaatcaggagaaatatgtacctagacaagtggattcatcctctttcttcagctattccatgcaagaaacccgaccatctgtccttgcgattttagttcaagatcttgcatgtgaactgcatgactgcatatgaggtgcagggtataagctgcagggaaacccgggaagggctggaagggactagcgtggatctgagctccgatacacttctacacggctagagctggccaaattgaatgcaaatcaagctcctttctgcatctatttcatacttgagtccagcccacaactgtgcatataaatctacctgtacggagtagagcgtgttgatccaagctcggtttcaaagcggcgtaaagactaaccgaggtaaatcaacagaccgagctgtcgtctcctcgctgaaacaggaaatttctgcccaacataccgagtattctccggaattaacgtagcttgggtttgactcaaaaggaacaccggagctctagcgtcccagtgttccggcgcggaactatctgtccccaccatgaaacccaggaggcaggtaccatgacatgcattgggtacctatcgaagccctgagtgcctgaaaagggggagatctgaacacgacgcgcaagacagatcgtggactgcgacccctgacccagcaagctctcacatacttggaactatgtctgctcgaatatgagttcacgagtggagaacggagctccgtagccggggcttcgaaagcgttgaaccgcgaggctgtagcctgtcatgtcgatctgaatttgatttcagctcggtagtcgcatccccgcttgacccctttccaagttttctctggttccccggcgggccgagacgcggaagtctcaattatggagtaagcagttggaaccttgggagagagtaggaggcgtgggggggactctagtagcgctgcagggaattagatatgtatatttgccaaagtactcttgcgatcagtatgtcgggagtatacatctgaaatgccttggagatgataagtatgagacagccgatcatgcgcccgaacgggagggtgcaaattggtcgtcgggacacccaggatcacggattgatccacttgggccggggaagagtgtaacattcttccccgtagacgcgagacttgcagcaagcaagtcattcggtgcatccgacagatcgtataggcatcaatggctgggcggcaatgggcatggcatttcggagatctcgaaaatcaggcgttgataaatgggaaatgcctttgttttaagtggcctagatatggacgatctagactcgagacctaatttcttgattttcgaaaaaagggcatccactagagcctcggtgtgactgtggggtgcgctctgatttgtgcgatattaaacggccttttctcggggctaattcgatccatggacaggacaccgacaaggttactccgtacgagaatactccatccggagtagaacggtagcatcaggcacactagcgaggaactgcctttatccgctagaggggagtcccgacgcgccggaagcccgttgatttccaatccaatccagtcccttttcatttagattccaggctaaggcttctagagggcgacatgaggcttctagactgaaaaaccgaatcctcgggcttgagacctggcccgaatgtggagacacgggggaactcccttcgacgctttaaaagatagttcgttgtccccaggtagaatattcttcaacagtatcatcggtgttgacgtgttgacgtgttggtgaccgccaatcgctaacaaaccggattcctcacgcgagtagggctgcaaattctaattcggcctgcagcttccgcgactcttttttaccctccccatgaagcggtgaatccgaggcttgatcattggagaattgccatcggaactggaaaaacaatccgattttatcagaccagatctgaaaggttgttgggcagcccttttgggaaatcctcgatctgccgcaagggggaatcgaagccagtgatatcagatatctgattgtcgaccttgtatatgtaccatacatattatcccaatctctgtgtcagactcagtcccagacaaagcgctaaaccggggatccgatctttccccgtgtgtcagaaatccgatacatctggaatcaaagaaaaaaaacaaaaacaaaaatcccgatttggatttatcttgatttatatttatttgggttgaccagttccacccgtggacccacccggcgttccttccaggtcgatcgacagccctttgtttgcggaaacctccttccgcctgattgttcggatttcttttttatttgtttattcctttttttcttcttttttctttttgactttcctatttgggatttttcttttattactttcccttttttgggaattcgattttcttgactgcaagggtgtcgggaagtctagaagtctttccccggctttgatctttttgatatctatttgtgtgccccttctcaccgatcattgataaacaactcgcctcgactcttcttccttccctcacttcgccttccaccctacacccttcacactgttgtctctctcacctactgggccctggtactgccatcccttttcaacatctactcatatccgccatcatgattcctattcagactcgtctccgtgagatgtcgctgcccaaggcggtggctcctatcgccaacaccgatccagcacatcccacctttgcctggagtggcagcgcctcttcttccatgtccagtcctttcgcccctccaccaactcccatcgactcgcttctcgatatcaacccacgcaagtcgtctttctctagtgagctgggagccgcatatgcattcccctcctggcccaaccgtccctctctgtccagcaacgactccaccgattcctgtgccagcgcctttctgtctgacgacgacctcctgtggatgccagagaactcggccgctgagcgagtcgtggacgaggccctcaaccaagacgccactaccgtctgctccgtgaccatggaacagcaactcttgcgcatgcgagccatcgccgagcaagaagaccgcgccaacttcctcgccaaggtggaagcccacgcacgagccacccaggctctccgttccgcaaagcaaagcattgtgacagagcgcgaggcatcgaagcccaagaagcgccgcgtcgcgcccgctcccaaacgccgtgctcagtcggcatccaaggtgctcggttaataagctcaccggcagaggccggtgcagcgcaggcgctctccgaaaaccgccacattatcttcacattcatgtcattgccttgccttatctttaatttcacccccgcatctctccgacggtgcagccccacacacgacggtgcctaatttcgatttattttcccagccgtggtacccgcgagatcgcctcattcgacactgcgaatcacactcgcagccacaatctccaagcacaacatgccatggtcgatcagccacatggaagcttcaccccccgggtggtattttccctgaatgcgaccatgcacgggccgacctcgggatccatgccagggcccccgcgcttacctaatatctcgctgtcggcgcttctagaaatgcctgggccaccgtcacctcctccgtcacgtccgaccctcttgtccttcacaccgctggttcctttggctctctgactcatttccacttccactttcacttttgtttttcttgtttttcctgtttttccctgttctcttttcagcgaatccgttattccccccatcccacgaggatcatgttcttgcatggagttccagcgattcaagtccttttcggcctaccaggcttgcatccatggcggtgtttctatttccttctgatttttctcggctcttcatgaatctgtctttccagcgctttgtttcagataccccgtcttgtataccccactattttcttttttttttctctcgttatcttccacgcttgatatttgaaatttcaacagcgctagttctctgatccgctatcggaatattgcgccacgtgccatatcaaatttgtcaatagccgtttagtacagagtacactaggaagcctgaactaagcacattgaccaaatcctgaaacaagcccaacaacctaaaataaaccagacccattatccaacaacactatgttgtatactcccaacgccctcgtacttttaccctagtccccgtccctgccacgttgatgtagatggagcctactgcccgaaatgcgcacaccctcgaaatagaataatccaacagcggaacgccagccttgcccgcctcgtgtcccccgcttgagtaactgcctgaccttggccaacgtagaccccgggaccctaaacggtgaggctgtaacagcttattgttgtctatgtatgacacgagggctgtcgttggaatgcaacagtgagatcgggccgcctttagtaatccacaatggggcgacatggttgacctcatcatgggactttgtgtactccgtaaatgtacatacattagtggttgataataaatagcccaccggagaatatcgtgaagttacggttggggttggggttgttgctaggctgtttttggccggagttagggtcttgcctggattgccctcgccatttttttctgttggcggggttcactagtcggctgtggttgaataaggaatgttaacccgaagttggtgttgactcttgagtagggatgctaaaatagccctggtacctatagtacatgctggattttagcgcttcactccctgtctatcacaagcatacggagtacattctatagtatagttggcgtttcaaagaaagcctcgatccccgcacgtagcgctgagctattaccgtcactcttctttgttgccaccgttggttcctctcttctgcatttacgctatttgtcgtggatgtgttgcaccaacccacaagagcaaaatatcaagtctgggcatcacatttcatgaatttagtcgggcacatgcttcaactactgtgttggttgttaccaactcgaaagaatcccggtagattgtgactgatatcacattccaatgagcggatcatacgtatgcctatcggagaagcttccgtcgagggcaatatcatctgataatgattcaacgttggattgtggtcataatccactagcattcgaaaatcaaagcgtgcgatacatgcaggtcaaggcactgtggatacccatatttgacgaagtagagagcattcttcaacgagtagtggccgcgtggtgcagtgcaggactttaacaatatatctactcaagatgatgtcagagacgttatatgtgaggtaacacttgatatcttgtccgaagttccttttacttgtctcttttttatatttttcttagaaatgagcagtatgtgactgtgccgtaaagccgaagaacatacagagcctagaggcgaatatgtatagcccagaccggatatgcagaaatccgacgagcatcattagtgtaacagcatcatcgatatcatactaagggtagctatgcaatttgtaagagcaaactgcatcgggggtgttactggaaaccatgaacggctgaattggcatataggatccatcccggtactcacagattgtcaccggtagtatcagggtgtgccagatagtcgagcctgatctatgaattagcgaggcgggagttaaagagagatttagttactttaacacaaatatacatcctagtcacaactccaaagggataacttgacactaatatttatccgcatggcagaagcaagggtgaaaccgaacttctatatggccagagctggtagtattgagcgggccaaatgtatccatgaagtcttgtaatggagaaacgatacttgctaccagagccttagtgacagctattacaatatcgactcgcattcaaaacgaccaaagtcgcggtgaatcgtcctatgtaagagcacgccattgtcgaggttgtcgattgtggtcacttggagagtggccagggttaaaggaaaacatttatatatcattgccatatgaaagaattcctagcctggaagccttgagctatcagcaccttaagctattagcctatagtctttccaagcagatagacaaatggtactataccgtagactgattgaacttgccaaaactgaatggtaggatgtgtgtgggaagtgagatatcatgggtcaggagaggaaacatgcttctatatttctttctaaggtctaaaagtgctctacaggccgtctatgatactctatttcctaaatgtagtcacaaatgaccaaaatgactatcagcccacttgattgataacctcaccaacacaccacttctcaatcgtgttcttcactgcagcctgtaggttttgcaatgttctttcagaataccaggcaaggtgaggtgtcaacaccagattcaagcccgctgcttctggacctaacaacggggaatcacctctcccagcaggttcagtggcgaaaacatctgtagccgcacctgaaatagctccgcacttgagagcttcaagcagagcttgctcgtcgacaattccacctcttgcgacgtttaccaacacggcatggggagacataatctggaactccgcagtagagattatgttgagcgtctcagcgcttcgtggcaagcacagaacaaccacagtcgactttttcaagccatcttggaacgggacccgacccggtcgaggagatacacctttacgctcagcaataatcacgttcatcccgagacccttcgccatggcctcgattcgtttgcccagcgatccgtatccaatgatacacagagtctcatcactacacagcaacggggcctttccatcaggtgcacgaacccgactgagcaaggtgccatgggtcttccactcagtatcacacgacaagcccgcaggaactgcaactgtggcgttatggagctccataaacttccgtcgagtggcaaagtaaagcccaatagcgtgttcactcacactgtcaatattacagccgggacagttgcacacaatgattcctcgtgcggacgcagctgctatatcgacgcagtctgtgccggtcgccatgatcactataaggcggaggttgggggtaaattcggggctgaggatctctgccgtcaggcgcgtggttgtcgttataatgattgtagcatctttgacgcgactgggcagatcaacgagatcggtccgtcggtggactgcgcgggaatgccgccctggtagatcgaattcgggaattgggcaatgaacagcctcaatggcgacgatgtggtgtatgatgttatttgcggtcatcattatgagaaaaaagagaagatgtggtactggctttgaagatttctaatgacttccccgccgtaaatatctccagcgcgataagagtcatatatacacttccttgcacgtgacgtgaccatttatcttggaaggcacgacagttcgccaccgcaacctgcaatcaacatacaaccactatatacaatggccgcctcacgctcagaggttagtccccttgggtttgccgaagaagactttgccgcgaagaactatgatcagttcgagcaatgcaacttacaaaatgacaatctcttccctatcgacaaattcgatatacttcgatcacgcacacccgcagcacctagggcatacaagctcatcgagccggcacttctgcttatctctcgaataattcttgatcgtccctccactctcggctttgctcgacggcgagatacaggtgcccaagacgtgttcgttgatagggaggcagagctttgcctcccagacgaagagattattgacctagttaaaaagcatatcccagatcttgaactggatcccgacatgagtgcaaacttctcatcatatggagaaacaatccttcgccctgaatcaccctcggatatggtaaggttggactacagccttttcaactattaaaatcataagctgcgatccaatctcagaaaatggcagggcttctattactcgctacatcgctaggccatcagatggcccatattttggaattccgctgtatccgtgcctgcaaactccgcactgaagatgaaccttttgaaataccacctggcattatatgccgtgaggccggcacggtctgggagctgagatcctttggtggccgaatttatccagtctgccagcctgatggtagtctgtacaacattcaaggcttatgtcttgagattgcatcttgtaattttgacgtgatgaagatgaacgacgatctcctggaggaccaggttagcgcctcaatcagaagacagacccggatgctagatgatgtgcaggttgaaacagacagcctgagcaagaagagaagggtccgtagatttcctgttcttacgaacatttgcgggggcaaaaagtcgagcccaagcttgtgatgggattgtatggtatcccctaacttgtattcttataccatcgatcaaattgttatgcacatgaagagagtggagggaccaagcctggtcattagtctagtgaatgccactttgaatcgctctattatttttcaatcatcccatccttaaagaatatatacatatcatccactgtcactatgcgttcgctctacctcgtcgcaactctgcttctaatccaacatcatagccccttgccaagcagttcttctcctatctctttaagcagcggctccttcttcacggcctcaaccttcatctttccaataaccgtatctgccacacccatagcgcgacaaatatcaattagaggaccatccatcggggcttcgtaaacaagaagcccaagagcaaacaacaacccatgcaatgattccacgctctcgttctcgcgcgaaacggcttcaagcaatgacgcggccagttcgacctgatcttcctcggacagaggatcgggctttccatccaagcgggcgttgtgattgaatgaggcaaggttgtacgcaaaagaggcggcaacaacgcggaggctcgtttgtgaatctaggagggagttggtcgcgagacggagacaggtctcgcggagtggggatgaagaagaggtgagttgttctgggtatagaggggtgctgaagagattgcaggctagttggagagccacgatgcggagattgtatggacatgaggatagatcctcttgggatagcggtgcaaggagggtgaggagggttgcgtgttgggcttcttcggcgaagtagccacttgcacgtgggtcaagcagaagaaggcgaactagatcaaccacggcaaaatgactgccactgggaagcgtcgagtacatggaggtcaatattgtggcaaatgtatgcaaatcagggaccctgatatcggcgacaggttcggtggttgagtgacgctgcttcacaaattcaataacctccacgacaccgtggccttccttgaacgcgtcaggaagtttttgaaggagcttttcgagtggtggaactttcttatacatgacgaaggttgtaatctctcgctgaagactgggaagtcgcagttggcgatggggatgggccgggtatgccatctctaacaacatacgaacgtttcccactagcttagccggggttgcgccgctccattgatcctgtttttggcccttcaaaaatgtcataaaggtaggagtcgatctcacgctgtacctcgtggcaacatcgcgagctgcgccgacgtcgactttgatgagagtacctcgctcacccacttccgctgcgagctggtcatatgttgggtaaacagccttacagggcggacaagttgacgatgtgaagaaaataacggcgcaggaatgggaagcactggacagctcactttgcagctgactcagattgctcacaatgcggactgtgcgcgctcctagatgtgccaccggctgaggtgtaggagggacagccctcgcagtagttgcttgagcacttggcccaggggcaggacctgtcccggtgccttgagtgacgcctttaagagccgcctcgatttgaggtttcatcatttgcccaaatggagtttccaggaaagtgcgaggtagattgataatgtggtccgggatacttttaccgacaaggaacattgcaaggtcttgagtgaagttattgcagttatgaagaaaaaggtcgtatgactagaactgattagctatagttccgttgctgaattgttaatgaacgaacctcgggtgtataaatggtcgccaacgagcccaggtattcttcgataacctcatttggaagctcagtagtacctagcttcacgacctccatgggctgtccatgatgtgtactccctggagtagcggtctgaataccctgaccgaagtaatactcgattccgttaaggacaatagatgtatgataaatggcatccatttgtatccctgtcaaggcaagggagtactgtacaaattagaggttgctcgctttcaataacgccttgaacataccattcgggccataccctatgttcaagattagttggtatttaccacttgtagaactggaaaacctacctttgaaaggtcgtagacatatagtgagacatccatgatgaggtgcgtgtagaatagaacctttgaagtgaaagtcgagaaaaggagcccttgaagtgcgacctggacaggctccaatccgataacgtcagcaccggcacccctggaggctgctatcaccttcgatcgtgttctataacattttctacggatgtgatgtttgatgtttgatattcttactttggcaaaatggaatgtggtgttgtaaattgacgcgctctcatttctcactaggtatatactgcctccaggggtctcgataatacgttgcgcaacttcagaatccaataaaggtatggatacactagatcaggagaggaataatgaatttgaagctttcatatgctttaaatgttttcaatattccaataatcatttatacgcataattgtgtataataaagctgttgaagctggcggcatcgcatacatcatttcccaatcgccgctctccccaccttcgtcacctccagggccagatactcattctgtccatgccaacacccttgtaaagccacaagcacaagttctgttagtgatatctacatggtaagacatccgggatatcctcaatacccaaccaaacctgactccctcgcagcctcctaaaaagcgcggagacgcagccagctcctccgcaccggcagcgccaaagcgcggacgcgcatccaagctcgccaaggagaacaacatcaccggcgaagaggaaaacgaaatcaaagaagtctttcacctattctccgacaagaacgcagacttcccagacgagaaggagggagtcattccccgcgaagatgtgcgcaaggcactggtgtaagctctgctagctctctccctccaatctacctacaatccgaccctctcttcctcaagcccctactcttcgactacagttaccaaatactaacaactttcccttcaacagcgccctcggcctccctcctacagactcaaccgaactcgcagaaatcctctccgccctcgatccaaccctaaccggatacgtgccctacagcccctttgtctcaatagcagcagccaagctgcgctcgcgcgatgatgacgccatggctgccgaggtcgacgatgcgtaccagctattcacgcgcggcacgaatggccccattacactgtcgcatctgcggcgcattgcgcgcgagttgaaggaggacagtgtgggcgatgacatactcaaggatatgattcttgaagggaatgggggtgctgggttgagtgccggtgttactttagagcagtttcatgatgtcatgactagagctggtgtgttttagaagtgggggaatttgtgtagactttttgatagatataagggttgggttcggcgtttggcatagcatattcttttagcagggagtctgaggggttgatactttgaagggatcccaaggttgttcgaaaatcgattatcatttgtaatgtcccattgtgagtgtaagtacatactttcctccaccagcttctgcgaaagacaggaaagaattaagcctgctggtactagcaaaaaaaaaaaaagagtagagaaacacagccagtggaaaaaaataatcagagcaggagcacagaaggagatatgacccgcgcatcaaccataaagaactcccaagaattgcgaaacttgtatcgtgccagagccgcgatggaggaatgaaagcaaaagtcgaaccgtttaggagatttcgtcagccatgccgatgtcctggctggcgctggcctgggggacagtgccgttgacaggagcagtgccttcggcagggggcgcatcgttggtgaagtaatcaatcatctcagcatcaagctcctcgacagtcttgggctttccgcggccggcgttgcggccacgagggcgagcagggccctttccacgacggtttgtcttctcagtaggggtcttggtttccttggccttgggggcagcggcggacttgggccgagccttctgactgtgaatgaataagcatatggatgcggacagctagaatgaacatcaacttacgcaatgcgctcagtaagaggcttggaggcagggataacaggaacgtgagaagcatcatagacaacttcgatctgttatataggtcagtcaatgttgcagtgaaggctagccagagaaaaaggatttaccttcatggggcggccatcgacgaggagtccgttgagctccttggtagccttggcagcagtgtcagccctgttaaattggatggaggcgatgccacggctagtgccattctggttgtaggtgagcatgacgcgcctaacggggccagcagacttgttgaagtattcctatagcgcaaacgaagacgattagtattttcgtcagacaatttcagtgagcgcggttctcgagtggtggcggcgcaaacgaggacggccaaaggtgagagagcatcagcgagcacacagcatcaatccatcgtctgtttcatcctggcattggaccacggagcatatagctccttaattgcaaccccatgcgataggtcgcaaatttgcttcccgcaatggaacataacacaccaacaaatatccatagtatcaagtctccacttcatccatacatccatcaagcggtccttcaacaaaagcattctttcacgtcgccgacatcatggcatagttttccaactaaaatccatttgtccatgaatgtgtcatcccaacaacgtagtgccatgtcagacacagtttaaacttctccgagtcactggaataggtaatcaccccatagcagcaaaactctttacggagagatttgagacaagagtctcgaataggtaggtttcagtctgccctctgaacctgttgaccactattccactgatgcgctcgctgatgcccgtaggatttcaaagtagaagagatgaaggaaatgagcggaattgaagagaggtcaggatgatgaattttcatcaatcatcctcggcatagtactcagataacaaggcaggtggatttccgcatgggaattgacacgagcaatgtacatcttttcaccgtactacaacacagtttgacttcttgtctcgcagagcgccagcaatgtgtatatatttgcagagacatggagaaggagcaaactgtgtgtgccgtccatcgaggaatatccatcgatgtgggaggtagagagaagtcgagagaccggtcgaaatcgtttgcgccgcgagtctcgagaaaagagatggcgatgaaagccaatatgagagcctttagatcaacataccttgacattggcctcggacacatcggaaggctgaggaggttagcgacaagctgaaacatcaatgagtaagaacttaccaatccgctgacaagaatcttgctggatccagtctgggcgacaggggccgggtgagcaggcttaggagtcgccttggtagacttcttcacacctccaacggtgggtgccttggtcgctgcgcggcgggaaccaccacggcgacgagcagtgtggcgagcggtctggcgacggctgccgacgagatcgtcaagagatttatcaaggttggcagacatggctgtgatgggatagcaaagctggcgatttgcaagttcagcaaaagttactgaatgaacgtgtcgtgaatgatatggcgacctaggattttaagtcgctttagaaagaagttgagggcacggtggggtcacgtgggttctcggaataggatgaagcaggtatgtttatggagttgaaaatgatgaatcgtgaagggaggaagggacgagagggtgaggagagggggcaggttgtagcctgattttgcactaaaccccttttggcgcggcccaatgcgaataacatcagccactttgattggacgaatgctacggagccccaatgagtatgtacttatcatctttgtcccttctttggtctgttatacgtgagatcaatatctcccaaaacaagcagaaatccattatgtgcaggtccagccttagagattagactatggaaaaacaacgcacccaactccaaaggcaagaagtcatgaagtagacgaccgataataaaaagaaagaccaacgtcctgagttcacaatatgtactagctcttgagagcttccaaccggcctcgcatctgcgcgagagtggcttcttggtcttcgaattcctcctcggcttgtggggattccggctccgagattttggccacaggtgtggtcgtgacgggctgcgcctgggcgagtttgccctgcaaaacttcctgcaggatcttctcgatctctgattctgcttccccttcctcatcttcaaagacagaagggtccatggtagcatcatcgaccatctcttcgataatacctgccctaactaattctgaagacagttggtgcatggtcgcagacaattgaggcaggcggaccagggtgttcacatccttcatgatcccagttgacttttgcagactgccctggattttgcgcgcggagaaggcttcattgacctgcattcccacactctgcagttgggctcggctggtattcaaccgtgtggtctgtttccggatgcgcaccagctcccttgcaaagactttggtgtcattgttggcttgcttggcctgggatggatttcgctgagcccgtttagaggcattgacaatgtactggcgagtctggctgtcgctggcttttagccgggctagatcgcggtcgagttgccgtgtatttgtgcgtattaaagcattgcattttctcatctaatagatcatctttcattagtgtcatatttccaggcatgagccacactaactgcctacctgggcttgcgggtcgggcccaaagaacaccgccttgagactctccatgaatgcgctcttgcgggaatggggatagaaatcgatgataaaaacaagcaggcaaattaaaggtgtgagggatgtttaacaaataagttcagtctcggggtaaggcttgatcagcgattgacgctcatgcccggtgcatcgtagagataggcggggcaaggctaattcgttgactatgctgtcgcaatttttgaaccctcaggatactgtatgataggacttttctcgaagaccaggatcgctaggtcttcggttcagtcttcagatcagtacacgctgatgcgactgtcaatattcgaacctagtagaatggtaccttgggatgctacgctcagtggtatccgaccgggagctgaagctgagtcagttctgacgtaatacaatgtcccacataattcatgcctaaggcatgcttctaccagtttctacaacatagcaatagtaggttcgtgaatgagcttctcttacacttcttctcctctctttgaccacgttttctatcttcctcactttcttcacttcttccagttatctttccattcctaattcaatatgtctcagaccctgactcccgaaggtatgtcatgactgctctactgcttccccgctctcgaacgcgggtctgcacattttgcatagaaattactatgacgttatcaatatctaagactgttttgaaacattcgctatgccaattctacaatttcatttttaagtgagatggaggcgctaacatgctttacttttcagttacatgggctcagcgttcatccgactcggaccctgagcgcaactacctttacgtgaacatcaaggctgccgaggttcccaaggctgatgctaccctcaccatcactgagaagaatgtttctttcaagggcgtctccagaaagggcgtaacatacagcgtctccctggacctctttgccgagatcgaccccgagaacagcaaagtcaaccacaccgaccgcgatgtcgagctcgttctccggaagaaggagctcaaggaagagttctggccccgccttctcgagagcaagcagaagatgcacttcttgaagaccaacttcgacaaggtatgcttgggcgttagttctatttgattatggggcatgactaattgaatgcagtgggtggatgaggatgagcaggatgaggctggcgaggatgactacgccaacaacttcggcggtttcggtggtgagggtggtggtgaccccagtgccggtgccggtggcctaggcaacatcgacttctccaagcttggcggtatgcccggcatgggtggcatgggtggtggtatgcccgacctcagcgctctggctggtggtatgggcggtatgcctggtatgggcggcttgtccggtggtgagggtgccgaggaagatgatgtaagactgctcgcctataagtgatctgtgattgtctactaacgcaactctacaggatgatctccccgagctcgaagaggccgaaggccagaagtccaccaagatccaggaggtttcttaaacgtgaaatgtctactttctgcgaaatctatgacgatcagaaacgaaaaatgagagtgcgttaagacgcctacgggatgatagtttgaattatggatttgcttgggttttcgccgtctattgactgcagggctattctgaccaagcagctttgatccaaggccaacctttatacatggtagatctatctcattgaaaacatcccaatgattgatgaagcgtgatgagtggtcattacaagttttcacgtaagttatataatcgagtaattttacgcccacggtacaattgtatattgtaatgatcaacaggttgttaggcagtatagttttggtggatgttagtcttcaaacgatagcgacgaaatattcacatatgaaatgggctctgtttaggcattctccaggatattttacactacaatcgatgcatttacttatgtacatcatagcttgtttcatctcttctttagggttctgtgggagacgaaagtcatatatacggcaatagagaagttcaagccgaaaaattctccagatagaaattgcttcaatgtacccttctttccctgccgtactgatattcgcatacacgagggctatattgtgggtgtcgagggcaaatcggagtgggtatatgacgcatgtcgttgtgaagaacattctcaagactcaacaccgtacatcccaataatagaatagtgagaagatagtgaatctctagtaaaaacactctatataagtgtcttcatagataatcccagcccgcttttatatttcgagtcgcaccgtagacacgcggagtaaaaggcccgcaccatcattggttaaccaaaaattaccgtcacactctcacacccctcgttttcgagaacatttcactctgcaacaaccctggcatttctgcccgccactcgatatcttttctttcagaatctccctgtcattctttcgggtttcatcagcgtcttttctttgccaccttgtcacccattaaggcgcaccctggacaggcgcattttcacatttttactctcccccaaacccgcgacgtcacgtccgcccaatcgccgccatgcctcccaagaaagtcgatcagcctaagaagaagaaggccaccgttgaggataagtcctttggcatgaagaatgtgcgtcatacccttgattgaagtcgaagagcgggttcgctcgtgatataccaacatgtcctaacattgaatgcagaaaaaaggtggtgccgccaagaaacagatccaacagttgcaagcacaagccgcaagcaacaaaaacttagacgaaaagaagaaggccgccgaaaaagagaggcgtgaggccgagaaggccgccgaggagcgggccaagagagagaaccttgagctgttcaagcccgttcaggtccagaaggttgccttcggtgttgacccgaagactgttctctgtatcttcttcaagcagggtcactgcgagaagggccgaaagtgcaaattctcacacgaccccaatgtcgagcgcaaggcagccaagaaggatttgtacaccgacacccgtgacgagaaggccgacgaggaagagaagaagcaaaaggatactatggacgactgggacgaggagaagctacgtagtgtcgttatgagcaaacatggcaacccgcgcacaaccaccgacaaggtgtgcaaattcttcatcgaagcagtggaaaaccagaagtacggttggttctggacttgcccgaacggaggaaacaagtgcatgtacaagcacagcttgccaccagggtatgttttttctccacttatgtgtgcctcctacacaatactaacagcgtgagtagattcattctgaagaccagagagcagagagccgccgagaaggccctcagggacaaatcgcctttgcacactctcaccctagaggactggctggattccgagcgtcacaagctgacgggcacgctgacacccgtcaaccaggagaccttcgccaagtggaagaaggagcgtatggacaagaagctcgccgaggcacaagcacagcaggccaaggaggctactggtcgtacgctcttcgagagtggcaactgggccgacgaggatagtgagcccgaagagggcgaggacgaggatggaacctggaatttgtcagtcatgcgacgagagaccgagaggctgcgtgaacagaaggaagaggaacgtcttcttaagctcagtggcggggttctacctacaagtatacccacaactatacccgaagatgtcacacctgaagccgtgggttgagtccctccacatcctcacgatactagattcgtgggctcttgaggatccttctcccccggccacatgcaaccgtagagtttgtttcgtgttgccatggggtcggatctcgatgtcgagtgatcgctacaatcgcttgcccaaactgctggctttgtatgcaacctcggtcatcactaagggctcggctagtcgcctgttccttccaacctctatacgtatgtactacaaatgtcatgcgtagaggaaaaggtctaggctggctagccacgggggcacagaggcttgatgggtcttgtgtcccatgtgacggaagaatcaacggccgatatacctttgatagcacattgttattttgttggtagaaaaaagttcgtccattcaaatgaacatgatgccttttatttttctatgtatcagattgcacagcatggtaagatctaatgatccaagagatatgtacaacatgctctctataaacaacgcatgcgctcgttaaatgtcagcaaatagttttacagcgaggcttttgcctgcagtagcctcttctcgagcatcacggctacaatgtcctccgcaataccacgggacagctcaaacccgcgaccaccagcaccatacccatgaacgacatatcgatcatcagcgagcttctctgcctcgatgcgcagaccgccctcacgagccggccgccgaccgacaatatcgcgaatcacatcaaactggccgccgctctcaggtgtgaaagggaaccacttgcttgcgttgtcgaggagtcggtgtctggtttccagtgatgggttcgggtcccagttattcggctccttcgtgcctccgatgatggttccgccttcgagaggacgcgggatacagaaggaccacgagccatccgtattctgtcgagtaatggtcttagagacagggttacggacaagacaggtttgacctagagaacatgtcaatccacggattcagaacgtacacgttcaagcgcattccagacacaaccaacaccatcaccatcaccccatagacacatacctctgataataaacgacttcgggtcctcaaacccagttcccgagcagttcaccacggtcttcacatttcccgccatactaaacgcttccttcaaattggcgagcgtataccgcctcgtctcaccccccttaagaatgaacttgcgcaacaaatgcgcacagtagacaggcgagttgatcacatacgtcccatacttcacaccccacaccactccagccggcacctcttctttccctagaagttggaacttatccaggtgcgaatagacattgcgcacactcagctgatccagatactcgggtggcggcgcctcgaggtgctcaacgccgtcgaggaactggatgcctgcgccgggctcatcggccgcagttcgcttaagccactcatacgtgcgctgcgcttggttcgcttccttgagggcctgtggcgaggagccaggcaccgggcggtaatgggctcctgcccatggcgaggcgtagttgacggaagtttccgatgggaagtcccgggctacgagaaggatggattgcgccggagtgagatattgttggatgcatagtgcggtggaaaggccaattacgcccgctctggttgagtttgtcagctgattgttgtgtcttgtgatcttttttcctttttcgctttcggagcggattggctcgagggtattatatgtgcactgacccgatcactacaattgtgtccttggacatgttggatgttggaaacctgtcaccagggattaacagccactttataggcacaattatagacgtgaagccccaatgttggtctgggaatgagtcaagaaagggtccggggaaggcgataagacccccgcggtcatatgataaagacacatggcatgttccacttggaatgcaacatgagtatacaacatggttggattcttattagtgatgaagacctctctgtatatccctagagttggcgacgttggatagttatactctcttaatccaacagtaggtgcacctatttttctacttggcccacattctatgtacggggtatgtacggagtatactccgtagtaaggcttcttttgtgactcgtattattgcaaggatcggatttgatccagtacaccccgtacgacatggaaattctttctttcattgcccaagctcgattgaaaactctaccggtgtgcccccgataccctgatacatactatcacagggcccaagctctaggatgttcgacggtgcctttttgtgcagggatgactgcatatctctgcatttctgtcacatcacaggaaccaagcagaaccactctggagtactccacactctatacataagcctcgtggaaaagggaaaaagataagacctcggaaacactatccccaacatgaaacttctgaacaatctattctccgaattccagacaagacgagggctgctatagggcggtatagccaggttagcccaatccctacttgattgcagaccgtcgtggaatggctggatgagtgcaggcattggctgaggggtggtcgtgtaggcgccgagggatcagcagtgatggacggtgattggccgagggaggtgacgaagctgcagctcgagaacaattgcaattccaatcacatctctgtctcggatcacattattattattattttctttctcttttacgtctcgctaagtttctattctttgaaaattgggcggttccttgcagttgggaaaagatcaagttggtcaagtcggtattagggttatctatacttcaactatataaaagtactagtagacggttggattacctccgagtgatcgacgtgcaggacactaaacatagtgcaagggccagggattctctttcttcaagacgcccgtgattcgggaacttgtctgcattgatctaagcagggttaactttttttctttgctcggcttctgcatgctcgttggtgcaagtcccgcaggacaacccagccaccaagaaggctcgatctcactgtctccgctaataatgtgttggatatggtgcctttaatgtcgggtcctgctccggtccctctgtaactgcagaaacgggacagatgtatggtccagttaggaaatgaaagcgcccagcaattcccccgagcgccaaccattacttagtagtccccgtattttcattttgatcgactatcgatgctcccctcttttttgggattgttctatttaccctacgggcagcccgcttatatgtccttagtctattatatagaaccaggcttgcatcctgtcacaaacttaagccccccccgtcacgctatgtgatgagaacgtgcaagcgagtcgattcaattttctagtgcttcaagtgtcacacttgaatatccattttctcttttttattctttcccctcccctgttgcaacggcttgcgtcctttttcttcccctcgccttctcgcatatttcttacatatcctgcgtctcgcccttctcatttatagggccctttcgagcctatttcatttcagtcacattctattccttgtcaggcgctaattctaccccgaacccaaatgcgccgtgagatatcctgaaaatccccttctttcaccttgaccggtactcagggtcgtggccgattagaaacctacctggcttaaacagagaggttagtggcccaatctcgtttagactcattcatcttccctcttgttctggtatatatcatttgggacttttgtcttgaacaagtccccttctagtaaatcaatttccccgcaaattgtctcatatgcatccaatataatggttgagttgacatggaataggagcttgggggcagaatcacgaccttcaaggacagtcaaagcaatggcacctgcaccgccagctgtcaagcctcgcttcgtcgcctgcacctcaacggcgtccttattcctctatgcccagggttcaacaatcctatgtttgcatcatgatacattggcaatcgagcgacgttttcagagccaccaggagaacatcgagtttatatcggtggataatgtcagcgagcgaggtgctggaagattggtcgtcagttacgatgtagggcagacggcgattgtctgggatatcttcaccggaacggagattgcacgctttgcttccttcgatcatctgcaaatggcatcgtggatgcgtaatggcaatcttgcattcggtgagcatcatcatttatatgttatatggactccgagttgctgattaaatagcaggaaatagcaagggcgaggtgatcctcttcgaacctcctacttcagagcacatctctgcgcgcaccattttcgacccaatcacagcccttgcgcccgccatggattgtcgtacttatgcaattgggtatgtcagatgaatatgatcgagagtaacacttagctaataagtttcagatatcagaatggttctatattgatcgcgactttacttcctcaatttaccgttgttcacacgctgactactgcgcgtgaaccatcaccaattatttccttggcttggcatgcatcttcatcgaaacagaagtcagatatgctggcaacgcagtcgtcgaatggcgatctacgagtttggagtgtggcaaaaccaccagggaaagaggcacctcgggtgattagggttttgaaacgatctgattcaaactcttctgatcccaaatggatgggctggtcaaagaacggaagacttgtgcaatatctggaagggtatgcaaggccctaagaaaatgattgagattgtactgacatgtgattatagagaaacatggtcttgggatgttcgaacaaaacatgttacctacgatccaattcctacaatcgatggtgtgcgaggcatcgcaaactatggtcctactgcgactctattcaccatcggcccccagcactccgtccagcagtatgatttggaaaatccggcaatggttgcaaatgtgcaacatcttccagtcattccccggccaggcacagcggaaggcagtcgatcacaaacgatgtccccacggcgcttgcaagacgctcctgatatccgagagccatcaggtgcggctaggcgaacgccatttgatgcaaacagcattgagagcctaagacagagggctgatctgactagccctgcttcatctcgcagtcggacggaatcggtgagctcaaaggcatcctctgggaagtataatgtgaggcctttctctccgccgagtcgttctggtcagagcgctacaactttttccatgacatcgactgatcgtgatacaccacaaccttctgcttcattcgcatatccctcctcagtctcaatgtcctcggtgagaagctcgagggcggcatcacgattgcggaatgaggttcatctcagccctgctgacaagaacattgtggatttattcccgttcactcgggcccgcttgattgacgtgccttataaacagcagccgcctatcgacgagacgaatctcacttcagatgatcttcggctccaaatgttgagcgtggtgtttggctgggatggagacatccaagatctgataatagacgagtgtatgtattgccctgtatcttccatcttggaaatagctgttgacagtccttagtgagccgccacgccgtgggtagtcagagtgctattctcttgacccaatggcttggcaagaacgatacagatgaaatggccgcgatgattagctctgggcaggtaacatcgtccgactggatgattcttgccttgagtcaaatgagcggccaagcgcaggcaaacaaggtcggacaggcatttgtacagaagctgcttgagatcggggacatacacacctcggcggcgatcttgcttggtctaggggacagcaacgacgccattgaggtttacgtttctcgcaatcactttatggaagctatcctcatgacatgtctcctgttcccatcggactggcagcgccagtcatacctcgttcgccgatggggagaacatgtcgttgctcactcccagcaacaactcgccattcgctgtttcatgtgtacgggagtggaaccatcagagccgtgggcatctccatctgcccaacaaacttcatcttttgcagagatgatttgcggcaagccttctgtcgcctcgcccgaaccttcgccggccaatatagtgccaccacccgtccggccaagatctacatctaactccaaaccttcactgaaaacaccagccctgaagctaattacttcatttgacgcgcagccagggcgtttccgcttccctggcttaaagtctgatgatcgtacgccaacaaatgcacctggaatcactccaattgctgaatctgctgttcccgagtcggcaatgtctcctggtggatttggctcttatagactgaacaatatccaaagcctgaatcacgcaatgacttctcgatcaaacactcctgctgccaatcggcgtcgtctaccatcgataggagagacaccagtggatgtgcacccgccaagcttctcacggtcaaactcttacagccagaatgagtatagctctacctccgaaaacgaaatgagtggacatgagcagagcaaggacaacaacagtggtctactcactttgtcagccacgaaatacaaccccggtctagactctatcaagcccagtcctcagactgctgtgcagggaacagagaagtttgccgcaatcaaggggcttccatcgccagctgctggtgtatttgaggctcttacaagtgaagaccaccgtaacgggtcccgagatcgaaaaccagatggccttcaaatcgagacattggaaggtgaaataaacccgcaggaccgctccgatttgatccccagcgctaaaagcaccgcttcgacattgaatagctacgcttcggccaggagcccaagtgttagtggccgtagtattgatcaatacatcagtagccttgatgaagcgaactatcatgccaggaagttgcgcccacatactccgggccgtggaaggcgtaacccagacgacactgccagccagagctcaaaagtcaatcaaccacgtgagggctctcgagatacccgcggtaagagtgagcgtcggtacattcaacccgccaagcgctctccttcctcgccggtgcccatgtctccggaagagttggctcgataccacaccgaagagtctgaaaagcgagctgaaacaaagtcaaagtctcgcgccagaagttctagcaaggtgagagggccaggttctcgaaaccgtcagcgctcctcaagtcggcacactgctagccggctgggtacagacaaacgaggccgcagcaatgaccgacaaggatccggcgttcgatcaccgtcgtcgcctcttcctatggcgtatcccacagaggaactttctcaggatgtcgataatcctttgagacttgttgaggataaccaaaagagactgcgatctcgccaccgaagtgctagtcgacgtcgcgccgataaaggaacagcttccaaaagagatggctctccagagaccagacataaaacatcgcaaagtctttctgtgatccaaacaggttctactacatcagatccctgggcgcagcaggaatctgtgccggagcagttgagcagcaaggtttttggtcaacaagacacatccaatgggtcttctaataggaaaccaagctcgacagccaatgatttccaagacattgcgtccccaaggacaccattcgtcaccctcgcagagaaaaagcgaagagagattgccgctgctgaattggaagcacgaagattatcactcgcccgcaacccgtcagcaccaaatatacccttcccgggcgagctgcaaagcgcaaaaagtccccttgagggctcccctccgttctctggtacaggttcatacttccaacgggctccatcgcggaacaaggcttcccagaacaaagcatcacttgactatcccagcagttctgactcgaactcttcacgctctggaatgcccggggggcttccggcaactcctcgagccatgcggcatccaaagtacggaggaagcggacaacacgaagaccgacctccttctgtgcctcttattcctacagacaacagtttcttccttagcaatgcccggtatcaaggagatgtcgaaagaatcggaagatcgatgtccgtccccgtgccagaaggacagtacaacgccccttcaatgccgaacgacctccccacgcatcctcgatttaacccagctctcccccgaagccggtccagcagccgcagccgcgcaaagggccataaccgcaccagctcaggcagctatatctccagcacctccccccacgttcaagtgagcatcgaagagaccatcgagcatgcaatgcagcgaggaccttcagcacaatatgagacaatcccgcctccaccaccccctcccatcctcccggaactgcagcatctcaacaccccacctccaccacccccgttcccacgctctgcaacgcccatctcgccccgcgagtcctccgcgactatcgacattgccatcgacaacaaccaagacctcggtcgtctcctccctcgcgccatgaccgccgccccggctatcaatgtaggcgaccaaggggctgactcccatcagccgggtagtccgcgtacgtcctttgaccaccgccgaaaccgtagctcaaacgagagcttcacgaacaagctgcgtagcttgactcgtatgcgcaacagcagtcgcagtgtcgagccttacatgcaggcgcatgaggcggagatggagagtctgaatgctgggccgaactcgaactatgttctgtcgagtcagagctatgtcgcgccgggcccaaactatgtttaggcagttaaggcttggctggctgacgagaagtgttttgtttgctttatatatcttttgctggtctttgttcttattcttctctcctctcttttgcatcatgagcccccttttttgattgttttttttatcatgaaattgcaatgtcctggatttcaacgtatcacgcatgtttttcaatgtcattggctttggtttgacattatctccgttcacgggctcataccctctctcgtcctgattgattgatattttccaagttatatgacccaatttatattccaaataccatatcctgtcatcaaccccaatcctagggctgattgaatgcacaatttcctagtcactgatttcagattttctttttcaagattgcagacagcgatgtctttaaagatcttgtttccattggtttttgctctcttggtcggggtctccctagctaaacggatatgcctgcaaaggcttaatgataatggtctcaattgtttctagatgatttgatatagaagtagctgttcagaggctaaaaattacacacttgtacatgcaaagatcgacagaaaaaaggcccgaggcatccccaagatcaccaaccgcggtttcgagatgatccatcattgccaatgttcctttccgcatcaatcatgcgatcaaactctgcctgtgcttgatccctctcagtcttctgagtggagtcatacttttcttggtcactctggccaaacccagcagagagagggttcggtgaaggctgtgacacgggctgctgtcgaggctggggtcgtgctccggcattctgtcgtctgatccggtcccaggcactgccagtactcggtgacccatcaatgtttgtattccggtattctgcagcggtagggctagcatcgtcctcctccaggatatccaaagctgattttgattcgggttgagtgcctctgccgcgtgcccagattgcaccaccattcgaacccgattgagacaactccgacgaaggggattgagagctcgcctgggtatcattggtgttcatgtattcagagtaagaattcgcctgcgcgggagcatcgtaagacgcctgctccggttcgtacacatcgtcgcctgcatatccaccaggcatgctgatggcctgtcgcacctgggagccaatgtctttctcgccactgcggatgctgcggacacgctcgctagcggcctggatcttacgcttgcgcacgtcctcgggtttcgccctgcgtacgtcctcgacgaaccgcttcaatcgcgggtccgtcaacattcgcatggcatcttgggaaaccgcgtaagcgctcgatgccatacttccaagactaacaataaagaccagtttgaataccgctgtgctgatgttgcctcttaaggcattatcggcccacatgttacgcaccgtattcaatagtgaggctggggtgggattgctcggaaacagtggcgacttgcgtgcttggttgaggaggtatgctgttccgatgaatgagcttacgggtatacccctccgcgactggtacaggcatcgcgttgagtgctcaaccattgcatcgaattcgtcttgggtcggggatcgtgctgtcagcacgtagtggttctccactcgctcattcactgtgtttgagacctttcgcgtccaggctgctgtgccgaaaaatccaaagtacaatgtgaaaagatcaggcctcacaattgtgtctggccggagtttgaccttgctatatttcgcgatcgcggggttgtggccaggaagggatcgggaggagtcgttcggagaagtgttgttataattctggcctgcctgcggcgaggcgttatcggagctcatggtgagtatccgagtgttgaggaaggttgaggtgagaggtgacagcttcgaaggttggctgggccgtttactgtgacgttacgcgctgacttagcatttgcataaaatctacataactatccagccgtatacaatttgaagtaaatcctcaatttgaatcccagtcattcgataaaaatgcaatatcagtgcataagcatgtgctgatgtcgtattcttactatccttgttataaattctgttgttctgggtttactggtcgggttcaatgccttataagaacccagaaagcctccgcgaaacctcctaccacttctcaatataaggtcgcaagtccaactcaaacgcaaatgtcgtgcgtggctgagtatgcaaataccaatatgagtccgcaatctataactagtgagtttcagacacaaagcaaccaattaagtcaaacttacagcgtcggggcttattttcgcatcctcatgctcaaatacccaggccttggtacgagggatatcaatgataccatcaataacagtatgagagacatgtataccctgcggcccaaactcacgagcaagtgactgcgccaacgcacgcagtgcaaacttgctcgaagcaaaagcagcaaacttagccgatcccttaagactggcagtagctcccgtgaagatcagtgtgggcggatactccgacgattcacgagcttgcaggagcagcggaagagcccgctgggcaaagttaaaggcgcccagtctgatatcggaatcacagtgtcagcatggtccctaggaacaattcggactatatcaagcttggaatgaagcagatagagtgtgtgagcataagagaaagcaaatacgtacgcctgtgacctgagtgcagtcgtgtaatcttcttctgttagctcaaggaatggcttgaccacgaagccgccacctggattgaaaacagcagcagctacctttgaggaagggtactgcgcttgaatcttgtcaaatgcggcattgacactcttcgagtcggagacatcggtactgatgccgatggcctggccgccgctggaattgatttcttgaacgactgggtcgtaattttctgagtttcgagccagaactacaacagagtatgactttgcaaatttcctggcgattgaggcgccctgttctttcatcagccaatcctgccttatatggacagagtagatgtagaccgtaccgtgccagggccaacgccggcaatgatcgcgagtgctttggaagccatatttgattgagtaaagttatctatgaatatgaatgtttgcaagtctgggttaaatgagagaatttaaacaactaaataatggtgaaccttagatatcaccgcttagaaatgcagcggggattgatcatcacatccgcaaatgatatcatctgcagagaatgggactggtgtatccccgcaaagataacatccaaggggaaattaggccattggccgatgaataatcctggatatgagctcattttaaggtctagctagacagcctcttggggagactaagattgttggcgaaataattccaaggttggtatagttcgagatgtcggcctcaggcgcttatcgataagacaaataaatttcccatcgaatctccgactctacaactctcaactccgcatcagacaactaagatggcggattcagatcccttactgagtgatctctgctcaatatggtatgcttatgtgcatttaaattctggtacaccttgcatctaacctgtgtccgtacagccataccaatcctcccaagtaccgctgtccacgctgctcaacacgcacctgctctctaccctgcacacgtcgccacaaactctggtcgcaatgttccggcgtgcgcgatccagccgcatacttaaagcgccaagaactaaacactccatctgcgttcgatcgcgattttaatttcatcacgagtatcgagcgcactctcgagcgcgcggagagagaagttgataaccgcgggattgatcttgcgggtggtgcccaggccgacgatgataattccgaaggttcccaacatccgactactggccgtaaaaggaagcacccgaaccagggccttgccaagggtgaggctgcgttcttacgcggtgccgaaactgctggtgtaaaagttcttcgagctccaaagggaatgtcgaggaataagcagaatgggtcgcgtttgcatcccaagtgagttgggaatctctcatatcttttgattcggaatttgtactgacgtatgtgtttctcaaggcacaagcgtcttgcttggaccatagagtggatcacgtctgatgggctgaagactattcgtgattctgtcatcgatacatgctctgttgctgaagcctataaccgttgttgcccacgtccgaaggatcaagagccagctaccaagccagtgaaggaagagaagaaagatttggacacccataatacaactatcgctgcacccggtgatcctgtcacgacagtggttgaagaggcagatacaaaacaaccatcatccccaaacaaagactcaacaaaagaaccagctgatgactcaactgagcaaacggataaagtaccaaatcagaccatcaccccccaccgcggtctctacttctaccttcaccgtccgcgaaccacaaccaaaaagcctgtcttagctcctctcttgcaatcctcgacactcaatgctgttctgcgcaatcggacagttctagaattccctacgatttatgcactgctagagtcagcagagacactgttttcagacaaagataactctaaattcatatctgaagaagagtatcttcacactgctggaccagatgagataggccagtcttctaccgcgagtgacgatgacggtgcggctggaaacaaagtactcgccagttcttcggtgaatcttcaagatgttgatgagaacttggtactggaggtattgaagaaagatctatttgaaccagtctcggaaactgagccagtatgagttattccggcatgaagagagatatcagaagacgttagccaatttggcacatctaccagacaatgtacgatacatagggacagctaattatcagtcaattgtacaattgtacaacgggtcacctctcagaaaaattatcaggcttagatgcagacgtattttcctgaaaaccacagatcctgctgatcgtgacatctcgaccaaaagaggaaaccacgatcagcgcggcttctgtcgagtcaaagattcttcgagttcaccttcactccacccgggaccaccttgggaatatcaaatgctccaggatcatcatgaaaactaacgttttgtccttcgggatcaccgtgatttatctcggcacggtagcatcagccttattagttgccagaccaccgtcgcagttaccagccaagaaacgtccacagggatgcgattgctacacaatatccgggcctgatccgggatattttcagcactacaaggtctgggactttcgggcagtggatttgaagaaacatgccaatctcaatctgtcggagcccattgattatgacgacgaggactgggacgatgacgctgaggccgagggccaagaaccgcaaaatggccgtctctcgcccggagtccataatgagaaagacccggaccccagatcgctgttgttctacaaaacctcattcgagaaagactggagcagtcaaaactgggaacgtcgaggcacccccatagccccagtcctcatgataaattcaaagcacaacgtcttcctcacccgggactcggaccagaataatcctcacgcgacgtatctcgtcctgcgtaccactcgtttttcagaatacacctccaccgcggaaatcgagactcgcatacgcaatatctaccggtgctcgctgcgtgtccggctgcgattattgccagccggctccgtcgtatcgcaacctcctcagcataaagaatggccaccgcgggatccacaacggcatcccaccgtgcccttgaacaagacgattccgctccgtgatagcagaccacctgatggcgcttgtgctggcatcttcacctaccatgattcgacctgtgaatctgacattgagattttgacgcgagacccgtcacatcgcgtgcattatgccaatcagcccgattatgattttgccgctgatcacgagattcccaatgcgagtaccattgccgatatacctgtcccatggacaacatggtccacgcatcgcctagactggctctcggacatgtcacggtggtatgtcaacaatcagatacaggatgccaaatcgtacagagttcctgagttagagagcatgattgtactcaatctttggagtgacggcggactctggacgggcgacatgagaattggcgacagtatatacatgggcattgaatacatcgagctggtttacaaccgttcttctgatgctttcagggccccttatgtgtctccttcgcaaaaccaggcccctcccacgaatggttcttttggcaatgggaatccattggagccggatagaaaggacgaaaagtgcaagccaggtaggcagggccgcgagtgcagaagaaagaagtggaggaacaggccccttcatgaatcctgtcgaagaccatgtaacattgatcaactctaggacttcccaggcagactgtttgtattattatcggttttattcaatattttacttttagattcctggtttcgactggcttgcttgttctgtcctctagtttagacaagatgaatgttttctcagagaaaatagatgtcaacctaatatgcttcagggctccagagcccaactttactatttggatactcattgcttgtgtttagtcctgatatcggattgaagagcaaaacactaacataatagaaatacatagactctacaataagaaaggagatgctattcaggatgaagaaaacctcccaagggaagatagaagaacaaggaaaacaaagaaatacgaccaaaccagttcacgaggaagggactgctttgtatcaactgagtcaccaatggtggtgaccgtggggtatcattcattgcaaacatcacatagaaagagcgcgccaaaagaaaattcattatccttttctcatcttccccgtgttgttcgccttgcgcgccagaatatcaaataatgtgtaatgatgaccgaaaacgccttgatgagggtgcttgatatggataaatgtgggtgggggatggatgaggtatgtgagattatgtaggagggtgaaaacttcaatgcatgagatcgacgagagagtgcgatgcttctgtagccatagacaaactggtctttggtgttcatttagagcaacactgcacctgttgctttgtctcgtgggttaaactcgccgtgaagaccaccgttcatgagttcagcaacaatctttctgcgaagaagtgtgatgtggcctgggccaatggcagtcggctcaaccccaacagtaattgctttggcgttggttaggaggaaaacaccacagtcacttccgttatcttgctgagaagagaccgacggtaggacggtccactcctcatctttgtattttggcccaagctccccacgaagccattgcttgacgttttttacctgccgttgaccgcgggatcccagagagtcgaaatactctattgtacggtctgctggtcgaataaccatgagagtccaatgacttgactcatgtacagggatgaagactgtgtcgacattaagcagtccttggccaccgatcttgacccgagttgcccatcgtttcacgccctcataccccttatcacgaagggtggagtagaaaaatgtgttgaaagtgtgaaagagcggccgatcgctgggtccgaggttcccatgcgattgacggagataatgtacgagtaaaccaaggtaggcattgatgatttcgtcattgagccaggcctcaggccgaatgcaagtgatgatatcccgttggtacaaattacctcctgctaatgatgtggcgacggcttgtccttgtccactctgcacggcgcattgaagtttggtaagccactcgggcgagatcagacgtacgggttgaccctggggtatcactctgatcggacgttggagatcgcgctcccgctctaatctttctttctcccgcctctcgaattctgcctcgtaccaagatgcaatgcgattggcaggaatcggcctcctgttggcataaaacaactgtacagcggaaacagggccatgcggaactcttgcatcttgtcgagcttgttgatcccacgggtcatcaatatccataagatcatcttggacgggcttgggggcttcagttggtctcggcgatggaatgcgcctagcgctcggaggaggagggatatatggcggtaatctagggtggagatgtatgccgagatccgtaacaagtgctggtgctgcgcgagcatctatgtccataaattcccatcccttcggtgggatatcttcctcctcgatagtcgcgccttgtgatacaacaagtgtaggtgattcgggaggagttaacgggaaggctcctgggatgggcaagtgagagttctccaaggctaggctatagtttagtatatgcgacatttatctccaagtagaggccaccataccatcgcgggcgttaattgaaggctttagggcctcgaagggattgggaatcttgagagagggctccgtgtactcagtgagctccgtgggctttgcaggggagacgcgccgcctgcatcgaggccagcggaagaaacccatgttgctgcgaactctgaagtcacctcgaacgacgggagtaagaaagatctactcgtccggtgacgcgctttcgagtaggttggcagttgaacgaacgttgagggcgtgaaaagggaggaatgagcgggtagatgaagacgaggcttcaagatccatcattgggcatgactggaatatctatcccaaacccaaaatcgaaggcaaatactccgcaaaggaagaggtatgggaacattatgagccgacgcgatgcaccgggttctttcatcattctgctgactcagcgcatattccgcggcccagcctccattgttgcgttgatcacttcagtactctttgatagctgtttatagagtctgccacaggaattattagatgaaacatcaaagcaacatgagactagggagaagaaggaacgatatttagcagaagttgaaggataacattcaaaggaactcctacaaaaacgatatacaaacaaagagagacaatatgtacggagcactactccgtacacaactcttcacttgaacgccctttgttctttgcctctaaagatcttatatgtcgtggttcatgcggctagtctcatacctgtatttgagcaggatgtttgactagaccgaacaacaactatgaatattgctttcaatgcgtatgtacatggataacgtaaaggatacttaaggtgacctgttccagcacagcctgctgagctaggagcaggccgaggagttagtggaggtaagggaagagggactgcaaggcgaattgcacttttatcaatacatttctcatcctcgttatcgggttccaagtccgattaggtcgaataacaggggtgcgacttcaatgaccacccatggaatacctaatgaggactgatatcagcaaaggttctgtcaaaatacaggggtttcacatacccgcatatacaactagttttgtcactacctccacatcgtaccgcacgcggggcttcttgatctgtgagaagacttcttgttcatcccgctccccagcctggatgtctagcgaggggaaaggtgttgttggaatgtcaaaattcacattagctgccgatgacatagggctacctcttcccatcatgtcttcataatcgtccagtgatgccgtctttcttggccgcacgggtgttccattgagcttgttttgatcctctgcgaccggagagggatgattgctcccagattgactctggcgtcggcgtttctcccggtacgccagggtctcatacgcatcagcttctgactgaggaccaattgaaatggctcggcggcggggatggcgcatcgtggtaaggatgtctgggatgtcagaaaagttcggaaaaacatcatgatcctttaggttatagggaacggtggtgtatttcctaggaataggtcagcataatgtccactggcgggaagtacagtcgaattcgaacttacgatgcagtagtgaagaaacgtcgagggagcaaaagcccgagcttctccagagtgcggaagataggtggcagaatgcgcagcagagcgggctttgttgcaattctccaagcaaacacacacaaaacgcccatgaaaagacgaatgacagtcttaatccaacccactgtcgccagatcgtagggaattgatccagacggataacccacccagatatcggcgaagtgccatgaagacacatccacgcctagcatgacacctgcaaatgcaacactatcgtcgaagcatgggcaatcatctgccggctccgggtggatgcggacgagaaatatgatgagaagtcccagcaaggaaatttccttcggcgaggcggacaaaatgaattcctcaaaggcaggtccgtaatgaaactgtatgagcccgatggcggcacccatagcacaaccaacaacacagtcgagcatcccatgcattccgcaatacagtcgacccaatacaatggacacgacatagacgtaggtgacggcttggagtaagagggtgacctgcgtgccgagagttgaatcgggtgaaccaagcagggctaaagcataaactgcaaccgaaacagcgttggtggaatgtgtcgatgggaaaccatattccagggctgcagaaccggacatggtgattcgctggagtggcggggacagagggcgaggaagacagagtaggtctttgaggaagccgctccaaaagacgcctgatgctaagatgtgtactaatctgtagacgatcactatcagccacagactcccacttgcgcttccaatttcagaaagataacgtacccgcgacccatactgggagagccacaccagaataggaagggtaagaagaccatgaagaacgtgtgggtgccgaggttggccgtgaatgcgaaatacgagtcgagagtgggcgtgcggactttctcctgtacccaagccaaatatggcgtctcataccggatcaatgggatgagcttttgtcgcggccaataccgccagaggggcagtcggttcgaatctatgtggcagacgtgcgagggttaggacatcgcgataagccacaggtggatgaaaatggaaccaatcgcatacagtgattcagactcttcagcccagcatcgggctggtctttcttgctcgtgcccatgatgcagtgttatcgattcagacaatgtcgcaatcgaatggattccatggaatggacaggccgctgcctgccagtccgtttgaaaggttgagggatatagggatcagaacataaggagcgaattgaagttggatcgaagaaaatgatataatcgagaaactcgaggttggatcctccaaagtggacggggagatcatccgcggctcaaacccctgatgcccatgtgtgtgcttagtcattttgcattggggctggcccgggggatgctctaacggagtatatacggagtccgaggcatcgatttttactaatttgtatttgatgttgggatagagtctctcagctgtagacctatattctgtacagagtacggagtacgaagtagagggtggaatacatatttatgtcggatatatgttttgcaatgtatacctatctggatcgtccttgaggtcgaatacatgtcaaatcgttctgatttagattttgaatgactatgttgtatgcactttgctattttcaactggtttacgaactattttgttcattacctggtgatgctactccgtacatactagttatgtggctcttagcttgtgctgtgaggatcctcttgcctctccaagtttgatatactctgattgacatctcctcggagagagcgagataaagccaagaaatataatgtaataataatagtatataaagtcaactctcgtaccttggaggctgtttagcgcgggacgtcggtcttctccgaagatgacatgcagagttagtgagtttttagtttctattctattatatggcttcgccacaagatttccaattaaatgcttggatttacaacccttctccagatctgagcctatactagacacaatataagttataatataacttataccacgcaaggtagaagaaagagtgtgatgtttgaaatatctacaaatcacatgacttcagataaacttgtataaccacaaacttggatatgccacagctgaacagtggggaacagggaatatattagcggagtcaaacccaaaacaggatcaagataaaccagtcaatgtcagaatacaggatatagaggccttgaatcgtgggaagcggagccctggcgtcatggagggacggccgttgctatggtagcccaggggggtaaacacgggtttcacggtttcacaggtctcgccagaccctcttgctctatcgatcctctagatcatttttagatctatcttctcctctttttccctcctacatctcattccatatcatctcttccctaccagacttaacacaacgccgttttcctctgtatcacattacaaacgagggacattcccaaggtccaacccctatccctgcatcatgagtgctatgtacgaagaccaatacaatgcagcatcgcgccgtcgctctctcgttacccctcctccatctttgacaccgcgtcacagtcgtacgcgcagcgacagcatccgagtcagccacggcacggccagcaccaacaccagtgtctccagtggacggatgtccgaggcgacaaatatcactcagccgccctcattctcaaaaaagtttgtagtggtgggcgatggcggatgtggcaagacctgtctgttgatcagttattcccagggttacttcccagaggtacgttcggcctacgaggaaagatgtgtccctggtgctgatcatcatttagaaatatgtccccacggtgtttgagaactatattacccaaacgacacatcgggcttctggcaagaccgttgaattagccctctgggatactgctggacaggaggaatatgatcgtttgcgtccgctgtcctaccccgagactgatcttctatttgtctgcttcgctatcgattgccccgcatcattggagaatgttgttgacaaggtgagtcctcaaaatggaatatctttgctcgatttgtctaacatccctcctcttagtggtatcccgaggttctgcacttctgtcccaccacaccgattattctcgttggcttgaagtccgacttgcgcaataagcgaacctgcattgaactcctcaagacacaaggcctgacacccatcacaccagagcaaggcgaaaatgtcgcccaacggatgggagcaacatacgccgaatgcagtagcaaggagatgcgcggcgtggacgaggtcttcgccaaggccgttgactcggccatctcaatcgaagaacaaggctgggtagccccgcagccggctggccgtaataaccgcaacaatcgcgccagtgccgtgccttcagggggtggaggcccccgccccggcaagaagattaagaagcgcacttgcaagattctgtagattgattctactctatctgtatttccttccattctcgacatcctttgacctttttttctctcttggccggaccacaagcctggttgcttcgtcggcttgcttgcccgctcgcctgtgtatgtgacatgtcgccgcaagctggacaaagctagacatgactttccaaacccttctctgttgtatcgatacgctgcgcggcccttacaatgatctcgattctttttatttttgctggaggctgtttcttttattccacctttgttccccgcttatttcctttttttggcctttgtcatgacccttgccctcgttccatttgatgtctcttatgactcgggtcttagccgttttccattggcatgcatgggaccggtgttctcgtttgtgttatctgatatgttctgttggcgaaagcgacgtcctttgtgttactaaacaatacatttgacctattgtgtttattaatgccttccccgtatgattcgtatatatttcccccgggaatctaactggaattttgaatggtatctaagaaaagagaaagaaaaaagaaacaaaacagcccgacgccgagacccgtcatgcagaccaaaatgtaaaataaaccatcacggcatggctgtcgagtcaccctcgtcttcacgctttattcccgacttactcgcatcactctccccactgaccttccgcttcacattgccattgccagcctcctcgccttgttcttcaggccggcccatgaaattctcaaactgggaccagagagcttccacagatccaaattcattgcccacctaataataccattagtagatgctctccctgtccgggtggtgaaccttaccgcaataacactctccaaattccgattcagacggttgatgttttgaagtacttgttccataccctgcgcgaataaattagcatcggttgcggcggctgataaggtgggaagttcgtagatattggtacataccactgcgatctctcggacgagttcctcgcgctgctgctcaaagactgttggggacgcgcgaccgccagagcctggtgtctgctggagccaggccatttttttggcttctgaagactagatggcgacgaggaatggcacgacctggcacgttcacgttgtgctcaaagacgcggcggttggggtttcggggagcgtcgcggatgattccttggcgttggatgtttgactagacgcgggcttttgcagggaaatatccagttggagtcacttcacagttacagtcgcagtcacagtcgttgcagttggacaatttgagatgaggttgatgtggggcaggtttgataagagataaatatgtatggaaatggcgatctacttccatcttgtatgtgacactctaccaaatccccggactcgtctctgaaatctatatgattgaactgaacaccgattctatatttctcctggaagttttctggcgttctggtccttgaagacgtttgcattgtgctcggttcgactcgagaagaaaggcatctttccaagagagcacacatatttatgatttcttcgagcgagcctgacgaattcttattctgagaaacaacaggctaccccaggcacaaatttataaaggtagaccatatcaataattgtatgaaggcaccaaaatatttcatctatctcatcctgatagtatcacgcgatgcaaccgttgatataataccatatcctgcagcttagtggcccgcaatcaagagcaaggattatcatctttatctacttatggtaagaagaaggcttaggagtcaaaggaagtgccgtatagttacatccgagttctagacttatgcataagccacacggaggccggtgtgcatcgtcagcataacttggcatagcgtgggcagaagatgtgcttatgcttgatgcattcattccgagacttagcgccgcggcattggaaaggggtgacatggagaggcccacaagtatatagaggcgcagggcaatttgtggagactcggatacagcaagctccgtgaggttgtcaaattgaaaactccaaataaagtccgggaaggtaagaatttcatcacattcgtactgtgtgtgagtgacagttgagctgagtacgataaatgagagcttcggagagaatcagacgacaactctagtcgggaatgtcgtacgaactctaatgttcagatgtcttgagtttatatatccaaaaatataacaggcttcagcgtttaggattaggtttgaaaatcccctgaatatggtgatatataagtgtccattactgtgtgcaggccctgttaaatttggtttctaataggattagacaacacgctcaacgacacaatggttgaagtcaagtatatgggagaatatgactacataccgtcaataccagctgccgtgatatttattggtctatttgggatcttaaccctcctgcattgttggcaagtgttccgtggtcggacttggttcttcattccttttatattaggaggaatatgtaagtaccagctcaatgaaccctttccttgggccttttccggttctttctaacacaggttttctgcagttgagattgttggatatatagctgtaagccaatctcgatactcgatcaagcgaaagagggaatatgctcacagctctagcgtgtcgtttcttccaagcaatacccgaattataccattccccctcttgccatacaagccatttttatcctcgtcgcgccgtcactgctcgctgcgagtatttatatggaactcggccggatcatgattgtcactggtggagaacacttgtcaccaatccgacgttcgtggttgacgaagatctttgtggttggagacgtgatatcatttcttgttcaggcaggaggtaagacgtccctcgacgtatgtgcgaatcttgcatctcctgattgactaacgatatattccaacaatgcaggagccgggatgctcgtcaaagccagcacagcagaaaaaggcggaaatgtgattaaagtcgggttgattatccaaattatctttttcggcctcttcataatcaccagcatcattttccacgtcaagcttgtgaaaaacaggtcaagagtgctacaacagcacgaagtcccctggaaaaggcaccagaccgtgttatacatcggcagtctgctgattttcgtccgttccatcttccggtacatcgagtacaaccagggaagtagcgggacattactccagcatgaattctggagttatattttcgatgccgctcttatggtgctggtaatggccgcgtttaacgtggtgaatccggccgagattagcaggttgatggaagggagaaaaggcgaatatgggacggagctgattggatgattgagacgactgccgggaaatccccggggatattcaatcagaccgactcaacctgtattgaagtgatgtaaattataatcttgatagatcgagccagagtccatacacatgtgaggccttagtcccgaagtctgtccgacattctctgttcgttttgctacagttctcttttcaacttgaattcagatttcaatccgcaggtctctcgtatagctctacatgtacgggatttggtctagggtccggcgcagggacagaggccgaaacagtaccaagtcgcgagtcgtatcccctaacacgaagagctgttgtgctagacaagggaaaaagggaaagagctatgctagctatacgttcctaactctcagagatatttacagcaaagtgtttttattagcttaacgaatgttccactccgagggtccagagtccactggtacctatcctgtacatactacaagcctgacaggtagtgaatatgtcagagctaagaccccgccggatttaatatttgccaggtacaaagttcaagaacaaacaaccgggtcaaatagaatttcggttactgtcgcttcataggaagaattcggaccaaatgtagttatggtttatggtttatagtttactacatcggctatgcaaggtgctatggctacaagcgacagggaaaagtagtagaaaagcaaaggaaattgtaataacaagaagcgaataatagacagaagggaaaagcaaaagacaaatgtaggtctcagaccgttcgcgttcttccttagtttctatacatgtgccaaaggaccaatccagatccaaatccaaatcctagacaagatcaaatagtcaaagcagggcaaaatcctgtgcccttgtcaaccagactagtgccagcaaagcagatcaaaagcagtccgaggctaaacgcttgataacacccgaatagcaaggtaacatcgtcgcgcacatcatttcgtatcattccaattcgtaatctcatttgcaatccacagttctcggttcatgtcacagtgccccgggcacgaaacacagactcaaccccgatagtcgagtcgtgaatccgtaaaataaaatcatttgcaatttttgttttttgttttttgtttttttgctcccattctcacatggcaagaaatgttcgagtattgtccacccgagtctgaatatgtgcctgagacatatagtaaagtggaatatagtattgcaggcgggggtgtatgtgcttaagagtgccggcggggttgcgcgaggatattgctcaaccgtttccagcgcggcgtcggggatgtcgagttcctccgagacggggatttttctggttttgttgatgtttgtgtagaggaacgggctcggttgttgatggttgcttcatggtcggcgaggacatcctcaaggcggacgtcggcgtcagacatacgtcgagagtccttgggatcaaggatctcgatgaacttggagggtgtatcacgcattgtgtagagtattcttattctttgcgctgatggaggagggagaggtatgatttcaaatttcaaagtagagggaaatccagaggaggtcacgaggacgtatagttttgtgtaggttcaagcgcgagatgaaactgcagcctagagattcgagtgtttcaagttttggagagaatggaggatgaagaacagaggatagtaaagtagagaataaaatagaaaagaagggagttttttttataaaagaatggtaacggcgtccgacagccaaaaaggaaatgtgaatgtctgtaccgaagatcagtggagtcgaagtataagatttgtggactatcagagcgtgatttctttgggatatttgggatgtttcatacttatagaagaagtacacgtacaagctagtacgtaccatccatgtaggcaacatttccaccccacaagccaagtgcatacaagatacacatacttcgatgcacaagcccgtttgggcaatgtccgtttgggctgcggggcgatgatcggcagctacttggtggcgtccgagtgacgatgaaccacgatgaaccatgatggttcgtagatatatcaagaagcatttgatgcaaggggagtcgaatttggtctagggtataagaagatcaaattctctcttctgttctccttctatagacaggaactccgagactctagccacgataaccttgtgcgctactcgtcttatcttagcttactttttgtggatgccatccatcaagcgccatgacgtcgatggcatgaaatctccatcagggtttcgatgctcaaatactgtagatgggtcgatgggagatcggctcctagtatgtatgatgtacattggtcaatagaatgcatgtgcgccatgtggtacgtcgtcttctataaaaagaaccgccacagcaattagccacttcaatctgccgcgcatccgaatctcttccaacaatttctcatataatatgaggcaaatgtgccatacaacatagggaggaaaggaacgcgtcaaaagggacaagggtgtcagaacggagtatacgtaggtggattcgccccaatggagattgctcagggctgtgcccggaatgtcaaccgggccgtcgggcggactgtgcggactattcgatacacttatctctaggaaagaacgggatgtccaacagggatggcgactatattcagtccgcgaaatacgaatgagagcagtacttggagctactattttctgtcgagaaaccgatcgccccgggccatagtgtcactccttcagtgcaccggcgcacacgtacattcgaaatgtggcgatgcctattggatttactctgtggtccccctttttctcaccggtgcctctgggtgaacagcaagatgggagtaccgggagatgttgccgccataatacaccgtcatactcgttgatagtcgagcagactcgcgcagcagaacacacacccgagtgtccaacaagcctagtagactcggtacgatctggtgtcaggcgggcgtagcagacctgtggcacacaccgagtagtctactcattcaatggaacagtgagtcccactgcgccaaatacactgctccaaagcagcgaagcacacactttccgatcaaaatggtacgtttctccgaccgaagaattgtccgcggatgtaagggaatacaaatggagaaaggaagaagagaaagagatagcttttgatctggaaaaagaacaaattaggcagtaacaactgcgtggagtcaacataacataacgcttatgtcggggtaagtgaagtgtgatagtctcattctaccaggttcccgaggtcaacagtcatcaataaaaagtccttttccgttcttgaacgccataacttcagctaaaaatgtatgtagcggatcactcccagcacccctcatgtaccgcactgcatcgcatctccattccagggtatgcgacatattatttaaattccatgtccgtcatctcgattgcgttggccgagcccatccagagaatgttgttgcatctgtgggaaagaaagagagttagccaagctcgaagcgcatgtatctagcccgacgctaaaccaatggaagcgcgcatcgcatacctaatcagaaccaagcccaatgcaccagttggctttccatcgataaactcttgtgtgtcgcgcagcaggacgttcatgtatgaatcgatgctctcgagagtgcctttgtattcggtctggccccactttaggcggatgaggacttcagtgcccacgctgtagagatatgtaggttagcaaggtgtcttaatagcaacgatgcatatgtgcgaatgtctcgaaagatatgctgcttgggctgcttggaccggggtggggcgagtcgcataccgagcctggaggaagggacgggggttaagcggttggaactgtagaatagcaagttagcaattgaactcatgggaatagcgcgcgggatcttgagcttgaaagcgggctgagcttgagggggagaatacggacactcattgtgactcgagaagagttcctggttggttgaggtggagtagtattcaggatatgatgatagcaaaagcccaatcaagatctattgcttcgttggttgatcgtgcttgtcgtgttgttaactgcgttgacatcggggtcggcgagatcgcgaaaatgtgcccaggtaagctgaacaaggcggtgatagatggccaattaccgcccgtgtctcttcaccgccctctgcataaaagtgcttgggttgacaatcgacacgatggtttttgctgcttttaggtgaatacactgcattaaatccttagagctacgagaaagcaatgaaattcatgttatggctcgttttctcatcattggtgtatctctcattttcagcatgctccgcgcccctgttcccatcacagcctccaagactaagctcccacagacaccagtaataatacaatgggaaaaaaaaagaatcggcgttcatcaaaagttcgtagatgtagacgcctataatcttcatcgccaggtagatctccgcttagcggccaacggtccaggtgatttccttgatgctgacttcttcacccttcttctcgtcgtagtcataccactcaccctccataaggtcaatgccagagaaagtagtagtggactcaatagccttagcttcccattcaccctgaattatcttcgtcagcacatgaaattacctaggtgaatctggtgaattcgggatttactcacgtcgggcttgaactcaatgaactcgaggccacggcaatcgatttcgaggatcttctgggccttttgcttttcctggacctcatagggcttaggtccgttaatgacagaggcagtgtgggttttctatgtggctgttagctgtgtgatcatggaaaagccgagaaggccagatgattcatgtcaacaaagcggagtaaaactgagagttatgagtttcgcaagaaagagggaaagaaaccatttccagctattggattggaagaaatagctcgcttaccgtgcacagtcggcacttccacacaaaattagcctcgccgcggctaccggggatctcgtgtacctcctatacatcaatccagttaataaaccattcaatcgtggcgaaatggagagcaggatgtaattaatccacgtacgaaacggttgaagctgacccagttagggtgcgtctcgtggcaggaggtacattgcactcggaaagtgtagaagtagggattttcctcagtgtcggtgggctgaagagcagtgacgctgtatcatcatatcagctttttgactctttgataacgatgtctgaaaggatctgcccgcgcgacgttcctggaattggagtgcagtgcggggagatccaggcacctgaaaaggctcaataatccagcacgtaagaaaggagcacttacccctccatctgagcttcgaccgaaagagtgagcatttttggcttgcgaagtaaatttgatcttgaggtgtgatggctgaagtcaagatcctctctgtaggtgatgcggggtggagatggaaaatacttaacgtagatcgagggcttggcatgtgaccactctgtaatgattgagcttatcaagactaaaaatatgacagaagtgttaagaggaacttggatatttgaattgtgattatattcatagaaattggaaaataaacgccaggaatgctcaagctatcgctcgcaatgagcgaaacaaaaaagcaaaaaagctatatacatctcgaaggtaagatacagacccaaaaacacgtcaacattctcacaaacggctctgttgagaatcttggccgagaggcttcgttgagaacgcattgaagaactcgttgagagcgtcaacagtgccacttccctcaaccagctgcacggtgcaagcaacgtggctgtcaggacgggtgacgacaacaccacccttctcagcatcaaagccgagcttctcgtgggctgcaaattgagcctgaggaacgcgtatatcggggatatcatcggcatagaggtggtggtggtagtcacgtaggacctgggggatggagtccatatcgatgttgttcttggagcctgcatagatcacagagagggtgaagagcttggagtgagggttatggcgctcgaagaatgacacatcggtaatatcagaccggcgatacaccgaaaggaacgagcgttctttctctaggttggctgccaggtcggcaatggccttcttagtcttgaactgattgccagcgaagatgaagatgcggaatgcaccgttagcgggcacttcctgctcaagctcgacaaagttggaatcggcaagacgggtgacagtggtcggggtgaaagcgcgacccggggtcagatgaacaccgggaatcttgaacagaggggacttggcagggtggctcacgtcccaggtgaaaatattgggccggtaggccactccgtatccactggtgaactcgcaagatgacttgaaggtcttgacgaattcgtcctcctccccaccagcacccacggtggtgtcgctggcagaaccgacctcgccggcagaaggacggcgcttggagaatagggctgcgtacttggaatcgaagttcaacaacgtctcagcgatatccttgcgttcgctctcgtaggtgctgagaatagaacggttggcaaacccactctccacggcgtggatcttccaggccatgttgagtgcgtcatggaaagcagtgttcattccctggccggccttgggcttcaggggcgttagcgatattgtgagagcaacaggggttttaacggggggtaccaacgctatgagtgtggcaagcatcgccacccataaagactcgctcgtcaagggtatacttttcagcaataccttgtccaatggggtagacagagtaccactcaacccggtcccactcaatccagtatggcttcagaatgttcttcgcagtctgctggacctcctcaacagtggcagtctttcgggggttccaatcggcgtcggtggaggaggcgatctggacatagaggcggaccatattgtcctcgcggggaatgaccatgattgagccagcgtcggagtggatggtgcattttgtctgtatactaacgcattagaaacatagaaatacgtgacattggttcttgttaggcatgcccacctcaatgtcagggaagttggtgcgcacgacaccgtccatgacaccccaaacataggcaatgggatccttgtggtggatcttgatgcccagctgctcacggacaaagctgcgggcaccctcgccactaaacaagtacttggcgcgcacattctcgataacattcgtatccaagcacttcaaattgacttcaacagggtaatcagcgttcgcaccatcgttcttgaagccaacaatagtccatggccgctcgacagttgtgccagccttcttgatttcatccaagaacacgcgctcgatcttgccctggtgaaccagggtggtgaaagggtagcgggtatcaataaagcgggggcaactaggccagctgccagtacggccgatgccagagccgtcagctttgggatcccagaaggcaacgtcgtacaccttggcaggctcgtaagccatgatcgagcgcttcaagccaaggttgcgcaggatctcggtagatcgcggctgaataccgtcagcgcgaccagtagcggtcggcactgggcggttgtcgatatgcttcaccttgtagccccatcgtgacatacagagggacaagagcagaccgacggggccggcgcccacaatgacaatatcataattctcttgttggaccatactgatggccgaaagcaaacacggggattggatggagggcagttataaattggatggcgcacggctatgggatcagcgtaaataagtacctatggcttgaaagaaaagcagagtcgctcagaggttcaccctgcacaatgactgggggagaatgaatgagggccatggctatccctatatactgtccgagaactggcgtaagtgggcaaattgggtgttcagctgaagtaacggagaacatccacggcattgagagtcggcgaaatcgtggggagcaccggctcaagggtcagggtagccaatcaagttcaccagaaacggagttatgggcgatttgtcagaatcgcagaaacaagcgccctgtggggacaggcctgggttcccacaatgtccataataccgtcgttgatcccgagctggtagccgcagagctccagtgtgactggattgctgcgatttccctctactccacccggaaacgatctcggtaagcggacggctggacacgtgaccttcccctcggcaaccatccatatctctgaacaacagctatgatggtagtttaacctggtacttacaccacagataacccgaaattatatgccatgctctagatgaaatacccatgaggtctggcacctactctaatgttgttccctcggtctctttccatgccactcctctttcaaaaaggaaacctacattcatggatggtcataacaacagcattagatggctcaagtcttattctacaataacaccaccgtcatggttgaatggtcgttatttttttagctcaaagctaccaggtttccgacagtttaatcttgaagaatatattaacgcctaaggcaacaacgacaaaaatagattaggttgggtaaaagttgtaccgttccgaactatatccatgaactacatgtgtagaggaaaaaggacatatgaggactgaatacataatatgcatttgtgagctatgtataataagtggtactagacaattcatttaccttactatcccttatagataatatgtaatcaaatcttgggagattttgtaatatccttactattactgtagtgtgacgggtggtcacaacacataaaatgcgttatgctagtcgtgagctcacacattgttggtagttctatttatttattttgtagtgggctctcataggtgtgggtgtgtatgaatcattgtgatattgcaataggcttgtccaggtagtccaggtcaagcccccctgttatggagatgtgctctcatagcatgtcgtctttttagggttgactcacactactaggatgatgtggtaaataggcgtttgattggtcgctccattaccaacctccttgattatgaatattaaattattttcttttttgtttgatcattcattgtttattcctatgtactttctttgttccaatattctttctctatgtccattctctttgtttccattatttttgagacattgccagccaccttattgaactagtcctattgttgcagaccaatatactcttttcggccgcaaagaatgacctcggttttgatactatgctttattgggaggtcatgaataaaaattaaatagctattgtgacgagacatggtgtcgccctaggactcgacaacagcgctgcataaatatcctcttcttccaataatatttcttctttccttcccatacttcttgatattttatgcttctgtttctcgggcttctgcgttcacctttctgcaattgcaactttgacttcgaacagcaccttgacagtaactgcaacaatgtctcagtatccaccgactcgtccctgggcagctcttagcgccattgaccgagatcacgagtcgggactcttctacgaagatgatgttcctcacaccgcaaagatgactgttaacatgagtcaacctgacttcgaagaccggggccccagcatggctgaaaatcttcgtgttattgcggaacgcagtgcagctcgtcggaatggaactgctatgaacaagaacgatatgtaaggtccatccttactaacttgctgaacgtgaaatctaatatgatgaacaggttttccaagccattgccacccattcctcaacaggaagcccctcagtcggccgccacagttggtcaggagggtgttgttcaaggttctggggacaacatcgacaagatgagcattcattacgtgcttgatagatccaacatgcatggacgccacgatcaatcctcatttgctcaacgtgaagcttctcaaattgctactcaagttggccagaaagcagttgccaatggttgtgtgcactcaagtgagaagatcaaactgaatttgcttcttgatggatgcaagctggaaggatatgacgatgagactccatctattcaacccagtggatctgagccgaccctcccacccctttcgtatcactcctacaatacgcaagccacctacgccaactcctcctctgcttacggttgcttggctcgggaatatgatgctctgtatgatgctcctgcatccgagacccctggttctcaagtcaatcccagcccttatcgcaacggtgacagtccaacttcgtggtacgaatcttcacccacctgctacgagttttctccgggtcctcagattgcattggttcccaacactaccccggtgcacgaaatcaaggaagaaaatcaattcgcagacctgggggccaccatcgatgagctgcttgccttgatcaacccggaaaaagaatactcacgccttgcgaatgacaatcacagcccagaaagttcatcttctgcttaccatttcactacccccagctcggtgtctacagatatctaccatgcggatcaatactctagccttgcttaccaggctccagacttcgtcattcgtgatgctgagagccctgcaagccccgacaccattcgtggagtcacacctgcatcgccagcatggtccccgccatccccttgtcccaagggatgttgctattggtcttcggatgatgaagccactgcatctcctgaacctcagttcgatcgggaatggtctgcttccgatgtgtctctgcaagagtcacctatgttgccttctcttcctcatgtcgcttcatatccatcttctgagcgtcgtgccagctacctaaaatggagagaggagagagcgcacatgattagtgccgaggaggctcttgtcccacggcaattgaacgtgatgaagaaggccactttcaccatggatgtccctatccacaacgtttcccagcaccaggcagccgtccacacgtctgattctaccgatgagggccctagccgcgcagcttccttcgtcagcaattattccgatgtcagcaacaccatcagcagcgcaactctgagtcctgtcccccgcagccctgatgtctccagttctgagggctccgtggactctcgtggaatcaagcgcaagcgatttaccaagaccctctttggtaagaaaggataccttgatgactacgaggggcggcgcgacacgagattccgcttctttaaggaggccatcgaaaggggacattcaacctttggcaatattaaaggaatggtaagtgcctcctgactcatcttttggaactatgacggggactaacaatctttttttttgacagttttgggatgagaatcgaggtttgatcagcccatcaaccaaacccagcatcgtcactgagaacactgctcccattactctgaacaccgaggtacagtcgattctgtacgccgagattgagggcatgatcacccacgccgccaacgaattcctgatgaaggagtactatgacggtcacctctctactagttctctccaaaaggtgaaaagaagatgggagaagaagcacatgcctggtgtccctgaattccgtttcgaccaaggtacccagtaccgcattatcagcgcaaaccgcgagcatctcaacttcggtcgacccagcaacggccttggccggaacaccgttctgggtaactggaagcggatatggaagaatatgagcatccgcaccttcgtgtctcccgattcggttatcaagaagaacatccacgatatcatggatctcctggagcttttgaacgccagggaaggtcaccttgaactgcttatggccctcgatgcgcatgttcgtggacagctgcagaagcacgagatgttgctgtactactgagatactctcgctcttaacttcggctttgtcgatttcaacaattcatgtctctttttcgttttcctctgctattctgtttcggctgttctgttctaggaggtcatcagtttcgcttcttgccagtttcgctttcgttttcgcttttactattttttcttctctttctatgcgttttttgccagcgatgagatcaaccaattcagtctagcgtatttcaaatccaacatcccagatgaaccttttttcttttcctagtagaccaactggaagtaagcatccctaggtaagatattgcaatgacatcacatgaaccgaaagagaattgatagctaacgaattcgacgctgtcttgaagcgtgttggctagtatggtactataaatagttggaatattgatgataacgtactgagtcaatcaaattagaccactcatcccttggcaatttgtcagacgttagagattgaactaatttccaaaggataatcttaatttaatatgtattcccaacataacaggtcaattgaagcgaaagagcaccgaaaaagtgaagttgtacacaaaacacgtggggcgacgtcatcggcttatagcacgggtgccacctgggcaggcagtcaccgctctgcttttgacaaagttcctgaaccacttcttgtaaataaccttaccttgccggtgtttcggacagaacatgttgtagctgtaacagtctggcccccaatgaccgtcgatacatcccgcgtttagcctccatccatatccgggggtggagatcgataccaactcgaacacaaggggtcagctccgtacaatcctcccgaatggcgggcccgatccacacctacggtccgagttgcctgcttgtggatgaagagccggacctcaccgaatttcaatcgcttcaatcaccaccagaaattcggtcacatttcttctacatctcatcattgccgattgacgatccactggctcccctgcctccacctacaagccatgggaccagcaatgagagagttcctcccacgccattctcggccagggataacatcgccttagaggaagcctggcgtgatctacgggaagcgagaaagactaaatccgcgaaccacagatccaggccaaatacatcgacagggacccccgggatagctgtgcccagtcatgaatcggtctcaaatgtcgaacaccgcaaggcagccagccaagaggatccctcgttggttggcagtagaggaagcactctgagcaaccctcctttcttcccggacgatctgccctcccgcagtcacaagagttccctcacttttgccacaggcagtactggaatgcgaatccatggacttggcaaggagaatcgcgtgggctccgcattgggtgatgagtttaaacacgacactcccagaggaatttccatcgatcagaaaagagtgcgatcgtcttcgatcaatgagttcaatacacccaaaacaagcagctctccattggagactgaaaatgtgggtgaaggcgacgaggtggttggaagtctacaggctgatcgttctcacgatgcaagcatgagtggctctccctttatacgggcgccggtgtctcagcctcagacgccgcttggtcgctcatttgagtcatcttcatcaagagaaggaggcgaatggcaggcggaacttcggcccagtactgctccacgaagtgccccgaaaccttcgggcctgagaacgaccgtcagcctggatcaattgacccaggactcggagagggagatgacagaggagccgaacaaacagtcaaagattccagtcggtgtctcacggcttcatctagtcgagttaccaaatctcaaggtgagtacaatttctacaatttctttactcggctctggcttacagtaacgctttttttatagatgaaacctatctactggagtcctcttcaggacatatcaagtgtggtccgagctacgtggttctacaagaataccatgttgcctgttgagactgaacttgcgaacaaattggaggcaggctacgtttacttgaagccatggagtgacacttggcaagatgaattaaatagttgcgtggaaaatggggccgatgccgagttgaaaattgttcacccgctgtggacaaaacaggatagtcagccttcaactgcacaagtgccacagagtagtgattcgcctctggatgaggcggaggatcccttgagattcgacaataatcgagctgctggtggcacgtctattcaatctgagactatcaagtcataccttacatcaagtgccatctatgtcgatgcaaaaaatgcccaagtacttcggcccagcttacttccctcagtgtcaaggggacgacgacctcttagtgcaataaggaaaggccatcagataggcatacctgtggttcgcggctttagtcgaaaatcatgggaacacctgcacccgtcaaaatccaatcctattgatgtgcgccattacatccgcaagacccagtcgaaaagtccttctgcgcaaggtgaacaaatatgctatgcatgcaagatggaagaatcgcgaccatctccaacagatttggttcttgttatccatggcatcgggcagaagttatcagagaggatggaaagcttccactttactcatgccatcaatgcatttcggcgagaggtgaacatggagctcaacaacgaacctgtttggccgcatgtgcgtcaagatcatgggggaattatggttcttcctgtgaattggcgcacgaacttgtcgttggatgaccccgatgttgagtcaggtatcgaagacccagctagcaacaacttttctcttgcagatatcacaccccagactctgcccgctattcgatccttgatcagcgatgtgatgcttgacattccttactatttgtcgcaccataaaccgaagatggtcaaggcggtgattagagaagcgaaccgtgtgtatcgcctctggtgtaaaaacaacccagggttccaagactccggccgcgtacatctcatcgctcattctctcggaagcgtgatggctgtagacattctcagctatcagccaacacatgttcctcagtttgacttctctaatacggctttacgcagcgacatttttgagttcgatactggacatctcttcctctgcggaagtccagtcggcttctttctgcttctcaataagggtatgttgaaacctacatcattccgccttgtatctaacattatcccagctagccttcttccccgaaaaggcagagacaagccaggtagcgaaggtgacgatctacttcgtggggttgccggcgaagcaggtcaatacggctgtctcgccgtagataatctctacaatatcatgcacacaacggaccgtaagtagattgcacagcctcttcgcttcttatactaaccatctctaccagcaattgcgtaccgagtcaatgcaacagtagactcaggcctttccaactctctcaaaatgggcactatccccagctccaccgccagcttctggcaatcatttggaagcgtctttcgctggaactcgaacccgtcaacattattgccctccacagctcctgcccgccccgcagcagtatccaagctgccatccaatgtcgagctcgagacccacgacttcactcgcgaagagatcgctgaaaaacgcatgcttctgctaaatgacaacggtcaaatcgattattatctctcaggtggtggtggccctttgaatatacagtacctcaacatgctgagtgcgcatagcagttactggaccttgggtgattttgtgcggttcttggttgtggagattgcgagaaagcaggggagagaaggaacgctgcttgcctttcgggctgagaagaagaagggatggaagtattcaaagggttgattcttttttgggcctttaccttcggtttgatttttattttgtgctctggggatagaatatgtaccctaggtgattgtgatattcacatagagacaagcatacatgacttcagatgtcgttccctgtaagcccacaacgtacttgtattttattaaagattgaaacttggttgttgacggtgtattgtctgatcgaaaaaaagatcgaaaagtttcgaagcaggacagaaaggcaagaaatgtgcaaagcttgaggacagacagataagaaacaacacaggcaccaggagatttaagctccgtctgggtgtaaatcatatatcgtatcaggtctctagcaaatgacccgggtgtctgagccatgaacattccccatcaacaaagcctccacgatctcacccttgataccaacgccccgcccagccctcaacaccaccaaggcattcgctttggccaaactgccgaccttcgaagaccgctgtccggcaccctccactcccgtgctcgtcgcgtacagccgtccatccgagcgcgacgccgtaaccacagcgcggtggtactccgtgcgcacgggatcacgcgggaagttatgcgttaggacgacagcaacaagcggaagaccgagctgcggcgcgagccaaggcttagagctgagtgccccggagctgtggcccaggccggtgagtttctgcagcgaagggagaacaaacaggttgagggtgacaagggcggaggctggatttccggggagcgagaagatgagttttgattgacgctcctgttgagaggatgtggcgtcgccgattggtttgaaggggacagttgcgaaggtggttggtttgcccggtttcatggaaacgcggccgaagtggatggtgccgccgagagagcgctcgattgtcggcttgaggaggtcgagctcgcccattgagacgccgccggttgtgattatcacgtcgacgctggaggaggctcggcctacgccgcggagtgagtcgcggagggcatgctcgagctcgctagcaggtgtgtcgcgagcgataccgagatcgacggtttcgaagccccatgagttcagacatgagagaagagatgggcggttagagtcgcggatttggccgcctgtaagagtccgcgggtcattgtgctccaccagctcatcgccggtgctcaaaacgcctacgcgtggtttccggaagactttgacagtcttggtgccggttgatgccagtaagccaatctctcctcccacgggagatactagatccccgcgagcgacgattttggagcctaatgcgacatcgctgccaggctcgcgcacattctcgccgggctcgatatccccggcgaggatttccactgtcgcttcttccttgccgtcaggtgtgcacgagtccaaggtggtatcctcgaccatgactacagcattcgcatttggggggagaggggcgccagttgtaattctagcgatagtccccggttgcaatggctctagattcccgccgacattggcatgggtaatggatgctaccgggaagatacccttcgtggacagttcggcggagcaagagtctggtgcaatgatagcgtagccatcgacgatactagctctataggctgggacagcctctgcggcgtagacgtcttcggcgatcaccgagccaatcaaggatgtggtcactgggacctcaacgacttctggctcaggagtgtgttcattgatccgccgaagcgcttcgtctacagacagcatagggtagggtgaggatcgataacgccggttagggcctgcactagggtcgttggactgcagtctctccgacggcgacgtatgtgcctttggggccttatgcccatgtccatggtcagaaccatggtggtggtgatgatgatgctgatgttgttgttgatgatcactaacgccggcctctgattccagtttcttcacacctccagcatggaggttccgtgaattagccccagcagactggagacaggcatgtggaagaagcttaacaacagcatcgaggttctccatggctcctttgggtgaaccgggtaaggtaataatcaaagtcttattgcggacaccagcaactggtctggccatcatagcaactatgcggaggattagctgaaataaatatagtcaaggagaagcgcaatggcagcgcccctgatgtcatgctcacatggagttactttcaaggaggcagcaatcatgccgtgtctgaagtcttggttagtttactagcgtcaatgcgctggccagggtatctaactcacactagtcccggcgcatggcgttggattagaggagagacggcctagtgatgtcatgagcataagaaaggcaagggtcagaatcagaatcacacacttcgggggtgttgtccttgatggcaaatcctgttcctccgctaaggaggatgaggttgtaccaattagggctatcggcccattcgtatatcgattgctggatctgggacacgtcgtccgggacgatcctgaatgcggggggttcccacttcccctctgcggccaagataggcctaagtgcatcgacgaccttgtcagaagcggggtctttcgaagcagtgtcggagacaatcaggattgcggctttaagtttgttctccatgatatgcgttgtgcataagtctggggaagtggatgtttggcgggggaagttctgttaaatcggggaaaacatcggactccaaagcccgacgtaagttaatgtggttgatttatagtgcaattagtgaaattgatgccactgctgcttttcgtacacgccagaggttagtctcttccaaggttgttcgtgttagatacgaattatcccgaggtccttgaaatccggtttgagtgtacggagtaaccccaatcaattcaacctgattcaacccaattagatccagttagattggacactatagaaagatataaatacagagttgccttttaataaattttgaacaacaggtcgacatgcttccttcagtaagattcaaaagcgaggctaaatatgtctagggataagtgattttatctgatatccatttctacaggtatttgttcatatccctagtgtaacaagctagaactagctcacgcatcctcaaatctgatacatgatctccggatcattgatgcaattcagcaaaaccaaaatggctctacgtggtcgaccccagacgccccaatgcggtgtatatcaaaacatgaacataaactatgaaaacgagaaaaaagaggcgaagcggatcgcctggggcatatgcttcgattcccgatatttgtttgccgccaaaattggaagctcttctctctccaaggaaggctcaatctcaggccgcctccaatatcactgccttttgggccacgagaaggccaacaatcaaaccgaaaagtcccaggactgagctgaaaatctcgatgacgagaatcttgacgaatctagaaaaaagaacaatgtaagtgacggccctaaatatcatatcaacaacaccacgagggtcacttacaggctggggtcggcggcatcggccagggcagcaccacttccattgataccaacggagataccgcaaataagattgcagacgccaactgtgattcctccccagaagaccgcatatccagtgtagtagttgctagaggtgtggattccaccttcggctaccgggctgagctttgaggaaaaaacaatggccatgatgacaccgtagatagcgacgacttcacagaaaatgatggagatcaagttcttggtgcgaatacggggtgctcggacaccaccaccaacaatcgatgagccggtaaggaagatacccctaagaaaatatgcggtcaatatcgggatagttgagcatgccaacggggagcagcttaccatgctgcgccgacaaccgagaagccgatacaagaagcaattccgatatttgcccaagcataaggagaaacttcctcaaggaaacggccgacctaatacgcgtcaggttattaaactttcgaaaaaaaatgggtgatttttgagcgtgaggttccgtacattgaatgcttctccgtctccgtggaagagcatatctagaattcagaccatttcattagctgccagatcgcacttcagatccattgaaacgtacacaatcccaccacgataagagcggtggtggagacaccggccggatagaggtaagccatggcgacctctataagcctgatgacgaatgaattaaaaggtcaggatgatcgcagacgtagagaacgcagccgataaggtagctgaagctctgggatggaagcgggtgatgggggactcggtggccggagcggattaactgctccgttcaggcggtgacttcgcgttgcgcttccccggacgtgttagaacacctgtttccccctgcttttactgttcttccaagggaagacgcctgtcttaaccttctatattctcataaggcttgtttttgtgtctttgacccagtcacaagtccctgacctcattccgcgccactttactacccctgaatttcagtcgcatcaatcactccgtgataatggcgtctacctccggggttgggtcgtattcgaaccccttgaagaagtttaagtaagaactgggacggcattgcaacggtgtggcattataattgcattgctaacggagatatctaggctggtattcctaggcgaacagagtggtaaggatctcatcactttatacttctactacatgcgctctagtcattgggaggggctgacacaagatatctaacgctattgcagtcggcaaaacatcattgatcactcgtttcatgtacgactcgttcgacaacacataccaagcaactattggcattgacttcttgtccaaggtacgccacattataccccgcacaaggattataattcaggcattcctccgagatactatctattcgcaaaaatcagggctaaccatcgtattcagactatgtaccttgaagatcggactgtccgtcttcagctttgggataccgccggccaggagcgattccgctccctgattccttcctacatccgagactcgagcgttgccgtagtggtctacgatatttcgaatgccaaatcgttccaaaacacgcgaaaatggattgatgacgtgcgcggggagcgtggaaacgatgtgattattgtgctcgtgggcaacaagaccgatttgaacgataagcgggaggtcaccaccgcacagggcgaggaagaggcaaagaagaacggattgatgtttatcgagaccagcgcaaaggtcgggcataatgtgaagcagcttttccggagaatcgcccaggctcttcctggaatggaaggcgaggccaaacaaggcgaaagcacaagtacgttcattctcgtgttttatctaccgacttctcatactgaccatgatccctcttccagtgattgacgtcaatatcaatcccaaggagacgaccagcaacgacggctgtgcctgttaagattcccccgcatccattctcccgtccttaagtgccctacctcgatgaacatcgaggctgtccatgatatcctacaattttcgaatatgtacatgtttcttctttctttgcttcctcctcctgtcaatagcgcgtgtctagatctctcagtgccgaatgcggttgtgtccagtttgttttctgatctcgtgggaggagacaaggtgttttgatttccgtttaaccagcatcatacgtttttttttggcagttgaagtttcttcgcttgacttccttttcggggtcttttgattatcgctctggtagcatgggctaacatgtctgatatgtttgatatgctttaattgatgaagctgtataatatggcatttcccttctgggtaacgcaccgcatagccggcgccaatgaaacatgaactccacactattatatatatccaatttgtccacggaatttttattcaaccgatgacgctaagaggcaagtcttgactagttatcaaagacaaaccctttaacatctgtctcacgctccaaattccacattctcttgattaaggagtcgaccttggtcgtatctgtgatcccgccatatttagcaagcgcgtgggtttttacctagaaatgtcatgtcagaatatgattatatatatcttccccttacccaagagtgagctatttcctgaggtatataaacaaacaagccgatttaaaagtacacaacgaaaaggcggtatattgtgtaacgaattatatagtcagactatagcatctcagtaggaagtcaatccatatttgtataaacagttcaaatcgcaggaggactataaccgactaatcaactacctgattaggaacatgtatgccttggtagtaaggcagaaaccgtgggttcaggcatcaatatttcataatgcataaatgcataaaatgatgagtaaagtaagggggcaagccacctatgcatggaaatgtagtcttcactacctccaaggccacatagacgtctatcaagtagaccaaatggataaatccaagatgaccgaatggtacaagccaagaatgagttcattaaatcaccgcacggtgaaaatgtaacgcatccgagcagaaatcgggcaattgatctgcgggcggatcgcccgggaaatggcgcccctgggccatctgcgttgccatacacccagccttttttcctcttcccttgctttgcccgtatatatactcaaccacatttccatcgctatttccatctcgataacgcacattcttggccagaggccctaacacacacactcatggggttcgcttcccgttttctccgcattccgcggccagaggtgagttgagatcgaatcttatcattgccccccggagctaacttatttcgtcatctcaaagtcctttttctatctgatgagcttagagactggtgcttccttgatcacactttcactgctcttgaataaaatcagtggcctatatggcctgctagctcttttgaccggctaccacctgtcccccgtacaactctcaatgtacctttggtccctcattgcccttggactcgcctcacttctgttcccccacattcgcaaacagtcgcctctgcaatgtctcgccctcacctacctttatgtattcgacagcctaattaacgctgcatacactgccgctttcggtgtgacttggttcttggtggtatcgcaacattacgatagtggcaacgccgcgggtccagggggcgagacgatcgcggaaaccgctggcttcaccagccccaagtacgatgcagcatatgttgagatccagaacacaaaggaaggaaataacttcatcgctcatcccccgcggtccgccgaagatttcagcaatgtcgtccttcaacccgagagtctccccagcatcatcttcatctgccttctgtgggtgattagagtctactttgttctggtcatgctcgctttcgcacgccaggccctccgtctctgggttgcggtcccgcgacacacccaactcccgacccacagccgcaacgtttcagtcgccagcgttgccgatatcgatcgggagcctttctccccctacagtcccgacggccagggctgggaaggtaagttgggtcgtgtaatgatcagtatcggccacagctattggctgggtgaagaggaagacggtaactggctcagcggcatcaaccacaagttccgcaaccgttcgggcaatacggagctgcccggcgcgctagaaagagaaagaagacgacgttccggaacgggtccaccaacaccgtcgccatctattgttcgatctactgtccttcaacagccaattgctgagactacacctgctggcatgaatgtgaagatgcaagattggaccgcaccccgataaatgatcttttggcggctattgaacaatattagtcgcaacaatgtacagccctcgcttcgactcggctccatgtcttcaatcccccatcttcctactggctgtgtgcattagatgcaacgaatttgaccgtacccagtcaaagggcacaatccatcttggctcttgtgtctgtcccatcatttgatgaagtcactgaatcggacaaccggccatttgatttcattcgatactccaccatcatgaagcccgagccccttttgctcgatacttacgacaaactgcatatatgaatttggaacgggtccaggtatatggcgatgatcaggccacatgtgtccctgattgatatctgggtccccctgggtctggaaggcgttttcaatctcatgatctcaaaatgagtcttccttggtggcaccactcgcggtcatcaatctgacatgcacgattttggcgtcgggacatggatatgtatattgcttatctaaaatgggggttctgcatatttccccgcgagggtctcatgtgttattttgtacacaattgcttttgcacacctcacacataataataatttcttctggatgacgattcaacagggtgtagtcagtaatactgcaatattcgagtctgtacaattcggaaggctatgaatccttctaatactaaatgagtcttgtagattcagcttttttcctgatagacgtctacaagatatgttgtagacgcactcggccgaattattacaatgaggctgattggctagagccatgataatactcgaccgagatcggtgcagacatttaaccttcggcatttgaccggtagtcttgttctagtagggatttccttcaggtctttggaccatcgagccctagaatagactgaaaggacaggaatatccccaataaaaatgcatttattgggcataggtaattgccgtggtgctattggtacgctaaaagcatgaagaaagatacttaatcgatgctctgggagccaatagcctgataactcgggattagtggacttcacatcatgccataggtcaagcagatcccttgagaatcccggtatctaagtaaattccatgaaatgtcgatgtggttctcgtagatgccaggcaccgcacaagaacctccggccaaatcccggcgctgacgtgctcgacggcatcacgggatcccccgcactgggcccaaataggaaagtttgcatttctgccactgggtgtttgcactgatgtcgtgatcgaagaccaatcagcagattgctgatctaacccccgacgacggagaaattgaacgagcgagggaaagaaaaccactggctcttttttttttttccttgtctagcaagagaattccaagagagctgagagacataatatttaattgtctcctctcatttgttaccatcctcttcggttctgtgctgcgagtgggagatcgctgcatacatactgataaggtatatcgcgattttatcatcccacttgtgctgtgatctcaacagccaatagtcgcaaatatggtgtctatctcaagcgctgctgaagcgggtatgtattttcctattatttctcatccttgaaaaagggagggcaatggctgatcctcatgcaattgtatagtggcaagaatcgcctacctcactagcgataccgttctatccgtgcagccctcattgcagaatgactcattgttctccaaggccctcaaggttctcaaggctaataagacgaccaatctcacgtcaaaagtcaccgaggtgagttgaaaacgtcggggttgccagactggaacccaactaatcctatttccaggttcaagctgtgcgctataatgaagatcccctcctgtctgccttcaccccccttcagaatggcgagactacctccgtcgtcactagctcctcggtcctgattaccgccgtccctcacctttaccgtctcgccaacagccccgtggtcattcacgttgctctggagccctctccgttccccgattactccgtaatcagctccatccgccagtccggtttcacattcctccactcagagaccgtgcaagaggctcaggacatcgctattacagcccacgcgctcgcccacaagtctgggaagggtgttatccacttctttgacccctccaactcggccaaggacccctctattcccgaggaggacgttgaggttgtgaagaaggttctcagcgttggtggaaactctgccatctctgctggaacccagactctttacgccgagtctggtcgtgtggccactgtcactgaagagaccgtaggtacttcacccgctggtctacccgaaccagcgaacttgaccgtgccctctcaacctcaaacccccttcaacgctagcgttgacaactcatcggttggctcctcacggagagacagcagtgctggcagtgaagccccgagctcgaccgcgacgactgtagacagcgccatcgctcggcctgttaacgcggccgatatcttcgagtggacagctcagatttggaacactctattcgaagaggtgggccgcagatacaatgccattgagtacaccggcgctgccgatgccaagtctgctatcttcgtctttggctccaccggagtcttcgtggatgctctcgccagtgccggtgccaacccggagttggagaacattggcctgatcactgcccgcctgtaccgcccctgggttggtggacagatttccaactctatccctagctccattgagaagatcgctgttctcgagcaggttcgcaagaccacccgatggggtccttctttcatggatctattgtccagcctgacaccctctggcgctcgcgctcaggcccctaaaattgtcgggtaccgtctcgggcatattgagccctccactgctgttcaggcccttcgcggtgtcttgcagaacctaaactccgattctcctatccagaatcttgacatcggaagctctcaggttcctgctattcaacctgctctcgagcagcctcgcattgagaatgcttacttgaagatcttgagtcagctctttggagagcgtctccacattgccaaccagcttggatccaacaatgccggtgtttcaagcactattgccgcgagccccgagtttggatttggttcactgctagctcgccaggaccgtcgccaacgcttcatccgggaggttgaggaagccaccaagtccaccgcttttgctactgacgttcccaagacttggttgtctcgctgggctctgaatgtgaaggaagccgccaaggccaacaagcttgctcctgatgtgattagtcgcctctccaacgatggctctgcgatttcccgccaactcctccagtctaagagtctcttctacgaagagtctgactggctgatcggctccgatgcctgggcttacgatttgggtaactccggtgttcatcacgttctcgcatctggcgcgaacgtgaacatgctcatcatcgactctcaacccttctctgagcgcgctgcgtctgacgccactcgccgtaagaaggatattggtctctatgccatgaacagaggtaacgcttacgtcgcctcggtcgctgtttacagctcgtacacccaggttcttcaggccatgtccgaggcccagcagttcaagggtccctcagttgttgttgcctacctgccttacaaccaggagaatgactcggcactcacagtgctgcaggagaccaagaaagccatcgatcttggctactggcccctgtatcgctggaaccccgacaacgaggagaagggtgagccaaagttctcccttgactccgagcgcatcaagcgtgatcttgagcagttcctccgccgggacaaccagcttacccagctcatgaaccgccaacctaagtatgctcctgtgctctctgagtcctatggcaccgaggttcgtgctatgcagaagagaaacgccaaggactcatacgagaagctcttggatggtctgttcggtgctcctctcaccattctctttgcatctgacggtggcaatgctcagaacattgctaaacgtcttggcaaccgtggtcgcgctagaggcttgaagaccatggtcttcgctatggatgagttccctgtcgaggacttgcctaccgaggagaacgttgttttcatcaccagtactgcaggccagggtgaattccctgtgaacggtcgtagtctctgggagcatgttaagaacaccggtgatctcgacctgtccaccatcaactattccgttttcggtcttggtgacacccactactggccgcgcaaggaggacaagatctactacaacaagcctgccaaggaccttgatgatcgcgtcgccttcctaggtggtcgcaagctcactgacattggcctcggtgatgaccaggacccggatgcctaccagaccgggtactccgaatgggagccccgcctgtggaagtctctgggtgtcgataaggtggaaggtcttcccgaggagcctgctccgatcaccaacgaggatattaaggtcggctctaacttccttcgcggcaccatcgctgaggctcttcttgatgagagcactggctccatccccgctagtgaccagcagctgactaagttccacggtacatacatgcaagatgaccgtgatctccgtgatgaacgcaaggctcaaggtcttgagcctgcgtacagcttcatgattcgctgccgtctccctggtggtgttgccacccccaagcagtggcttcagatggatgccatcagtagctcacacggtaacgagaccatgaagctcactaccagacagaccttccagttccacggtgtgatcaagcgcaaccttcgtggcgccatgcgtgccatcaacaactccatgatggacacactcgctgcctgcggtgatgtgaaccgtaacgttatgtgcagttctctccctgagctgtctgacttccaccgcgagacctgggcaatttctgccaagatcagtcagcacctgctcccctcaacctccgcctaccacgagatttggctgaaggatgacaatgacaagaaggttcaggttgctggagatgcgatggttgaccacgaacccctctacggtcctacctaccttccccgcaagttcaagatcactattgccattcctcctcacaacgacactgatgtctacgcccacgacattgggttgattgccatcaagggcgccgatggccacctcgagggcttcaaccttctggctggtggtggtatgggaaccacccacaacaacaccaagacctacccccagaccggtcgcatgttcggatacattcccgccgacaagatccaccttgcctgcgagaagatcatgctcgtgcagcgtgacaacggtgaccgcaagaaccgcaagcacgcccgtatgaagtacaccatcgacgatatgggtgttgacgttttccgaagcgaggtcgaggcgcttctgcccgacgggctcaagttcggcgagccccgccccttcgagttcaagtcaaacgtcgataccttcggctggattaaggacgatactggtctcaaccatttcacgtgtttcattgagaacggtcgtatcgaggatactgctgatttcaagatgcgtactggtctccgtgaacttgctgcgatgggcaagggcgagttccgtcttaccggtaaccagcatctaattatctctcgcatcaccgacgaagacctccccgccgtcaaggagcacatggccaagtacaagcttgacaacactgctttcactggcttgcgtctgtcttcctctgcttgtgttgccttccctacctgcggtctggccatggcagagtctgaacgctatctccccgttctgatcaccaagctcgagtccaccctggaggagtgcggtcttgctcgtgacagcatcgtcatgcgtatgactggttgccccaacggttgtgctcgtccctggctcgccgaggttgcctttgtcggaaaggccttcggtgcatacaacatgtacctgggcggtggctaccacggccagcgcttgaacaagcgctaccgctcttccatcaaggaggatgagatccttgacattatgaagggcctcctcaaacgatactctcttgagcgcgacaccgacggcgagacccccgagcgtttcggtgattggtgtatccgcgccggtatcatcaaggccaccaccgacggacagaacttccacgatggcgtaagtgattccttctatgatatccaccctattgattctaataatctcctacaggttgccgaagatgaggaagaagaagaagagtaactgctgaacacagccgttacacatctaatctccggttttttatgactctcatgggatctaaaatttgctttcttccccttctaattggatattttcacgtctgtatctcacgtcgcaatgcattgatgtcttggcgattgtatgattccatgcaaaaatgttagatttcgtctttttttctcttttattccctttcatgtgcatttcaatgacagctcaagtctgcccgtacatatatactcaaatgatatcatttctctagcacctcttgctatccctctaggccttgaaaaggtggtagaaacccaaccgtggaaacaggccagggggcgttggtaaccacgggaagctgatgcacagctgacatcacctgggcaccccagtgcgtctttgacttcaaaagtttcaatgttgatttcaattgatcatcccttctatcattctttctatcattctttctatcgttacttctatcgttacttctatcgttcctcttattactttcgttaacgaccattccagttgcaatatgcagatcaatatgaaatcgtttttatcagtgatgttcgcgccactgctctatctacgccctcgcttccgtcaagaccaggactggtcatatcgacaagcactagcaaacactttcattaaagtctttctatacatcttcgtggcatttcgcacaaaaccaccactttccctcaagccaggtctagacggagaccgcttcgtcgtaatagagccaggtgcaccagagctctacactaccattgcagtggacaacgagatccagccagtcaccgtgggaggcacatggttcccatcactctaccaatacaacacaacgactacccaagataagtacgtcgtgctccagtttcacggcggctcttacatcctcggcgacggccgcacatcatcttgccagttcctcgccaacagggtgctagagcgcacaccggtaagtcacgtcttcagcctgcagtaccgtctagcctgcaaccccaacggtcgtttcccagcccaactccaagacgccatctccgcctattcatatctactccacaccctgcacatcccggcatctcgcatagttctcagtggcgacagcgcaggcggccacctcgccctcgcactcctgcgttacatcagccactttgacgacgagaaggccctcccaccaccaacatgcacgtggcttttctcgccctggtgcgatattcccgctgcccgcaacgaggatctctggaataatcttcccaatgtgcaaacggactatatcccaccgtcgttccctaaatggggtgcaaagcattttattggtaacctagagatcacgagcgaggtcgagccgtatcttgcgccgctctggcatcccttcatcctgccttcccctgttttgattgtgtccggtggcagggaggttatgtgtcaggaacatgatcggttagcgaggcatttgggtaaaattcagcagaatgaaggtcgagtggagtatttcgtgcaggataatttgccgcacgatgtgcttatggttgcatggattctgaactttcgaaaggaggctgatcagtgtgctgccaaagctgggactttcttgacgagaatgcagtctatgtcagaggaggatgctactcacgttccttctgtggcttttgagtgacgatggtgttcctatgtatgccatggtataccatattgctacctatgtattgctatttgagctaaattatccgattgaatctacctagtagaacgactgcggttcagataaactctctatagattctcctgggttcattgtaaggctctttagtagccttctattatctcagctctatttctcttcgcctattgtcatttgtttggtggaaagaaccaggaaacaccaccttccctaaagtttgacttgtttttcaaagtgcagtggtttgtttgtcaggcgccaggcagtccccagctccttcagatattcacctccccgcattgtcttttcctctctccttctctttcctctcaagattgtgtatccatcgcatcttgcaaccgaggatcttattcttgatactatcgtattcaacccaacgctaatcagcgttgatctcatacaagttcgttgggatatcgattatcgatttccattgcctttttcgacgcgttaacgcgttgaaaacactaggacagacctagataccccgcaaacgcgcacagctttgtcgtcaccgggcagtggtatacccaccgtgtcagctgaaaatggcacccatcccaggaatgactggagagcccgcgcgctttgagaaccagtacgacatagaatggacaggccacggcccgtccactaaaataattacaactgacacgtacactagctacagcaagctcgagaattcccacgggctccagggttggcccctcttgcccgtcttcactgccagcattcttattgcgcttattgttgtgggtatcgtcgcccacgtttgcttctggggaagagacaggtatgtgaagagtagcctattttggattgcggatcgctgatttgagctggtcatgcagccacccgcaagctgcatcttccgaggataagatgaagatggagaacaccaaggaaacccgctccggtatgttgagacattatatctcttgctatgtgctacgctcacgatgtatagatggctggatgtgtttcattctggcctgccatgctgtcattaccctcggtgtggtctaaagaggaacatatacagctgctggagaattgggctgtcagatgaataccccctgttctctggctagctaacaattctccgtggaactgcatttgtcttgtggaactcgaagataagactcctagtctggtgcttgtcgtctcaacgtgatgtaatgatctattcatgagactggatcgaagataagttcgattctttacgaataatatttctttacctaaggaataacaatccactcagcacaaactgagtggagaaaagcatgtactccgtacagtctaaattattatcgacagcagaacatgttagccctatagcatgttaacatgtcaacgggtgtcggtcagctactgcgcaaaatggaaaagaccataacaagtggaaagaaacatgaccgagggatcctgagctatttcccggtaaggtgcaagccctgcacgaacgtcacatactgcagtttctcacgagattgtttggcggcgaggacccagcgagagatgacaacacgctgcgatctgaatacgtactaacatgatggctgttgagatcgatcaagcgacaattagaaaaccgctaggattgaggatatttataaagctacgagaccttgggtgatggatctatgtctcaccaaactagatctaaacaagcctacgtgggtcgaatatttagccaaacaactctattattgacgtgcaaatcctaaagagatctgagagtagtccacggtccagctaattgtatttagatcctgctcaaacccagccatctccgtcagttgacatcgcaccaattcatccaacccgagcatcctgaaccgcgccatgatgtaaggcacatcggatcgcgtgggccacatcattctcacatgggtgagattgcaaccgacatcgaatgatgccggtgcctgcttcttaggtatagaggcgcgaagcccttgcctggttggttggtcattgcgaccgctttcaagtgactgactgggtcacggtgggacgaatacaccaccccgcttctggtggccttgacgtcccttactcattgcgactaccccatccgggggcatttctttgtcgacttccgtatggttggttgccctatactagggaaccgctctcaagtgactgactaggtcacggtgagacgaatacaccaccccgcttcgggcggccttgacgtcccttactcattgcgactaccccatccgggggcatttctttgtcgacttccgtatggttcgttaccttagttaaaaggaacggtgcgtatcttggcacaagcgtgtcagatgccctcaagtcatggtagcgggctgatgtaagtatggacgaacagattgataacaatagacggaaaataggaatatttgagcaggggtgcgtctctcacgctaggaaggcatcaaagaagaattggcgtgttcgatgatgacggaggctagaagagcctcgacgtcaggagagtgcttcatgatgagaggggggatagcatggtggctctctcagcacaactcggtggtacccaagaagaaaaaaagagtaaacaaggggggaaaaacgggatcttgattcaaaccagtacacaagagcggtgagtacataatcctgaaccgataactagctgtattttctgccacatccccgctgaggaatttcgataaaaaaagttatcagtccaagtcgttcattttgcaattgttactggttccctcgttctttcgcgtccattgttcatctaagatatttagtaaccatatcgccatggcttttcctgatgacgatcctgtcgtcgcttcctacgacgtcctcctcaccgactccgatgtttctcgctatgtcttccaatacgttgatcgggaacacgaccgtccctacaatgaccaagaaaatcaacgaccgatccaacttcgacttaagccgcgcactggtcttattgaagttgaagtccccattagtacccgagaaaactacgacgtcaacaagggaatgcgctatggggatgcggtaaagaagagccgttccgcgcgcgacgggggtgcttacggtatggcaggcggctttactgctggtagcgggaccgcagctgcaggagggagagtcaagatggaagcgaatggggatgtggagatattggataataagagggccgtggattctgcatcattgctgcgagtgcagtcacttggaggtcggataaagccttctgaagaaggcgatccagtctacatgctggccaccttcacagatagtacgtttgtcctacctatcactttcttctccggtggcaacatttgattctaacgtctgttcatagaaaacttgcatctctcccccgtcacatcggttgttcaattccaccctcaacttcaccacctggatgctttagatgagatgccaaaagggaaaggctcacgtgctaaaaaggatgacgatgaccgtcctaccgagagcgaagcacgtgcaattgatattaaggtcaaggccgctgaagatagtgaaggagctgcaaacgccggcaacctagacctccttaagcaaatgcaagatgaaaaatggaaaacatacggctgggttgacgccgaggtaagttctctctttgatggacctttctcattcttgtttcatactaactcttaccgatcccaggccgaggattcttggtacacatatgaacgctatatgattcacaaggacaccgaacatctcccatccctagaatcaaacatcgagtcggaagactacctcgataaaatgagtgcccctaggattgatcctacccgccccgacatgactggttgggctatgaaggaaaatcgccggaggcaaagagaaagccgcgcaggtaatgaggccgaatagcgaagagttatattgtacaataatccaatcaaccaatttctagcggaagcttattatcatcctcgcaattatctaaggcttcatgttgcttcaagaaagaacatgggaagccctatactagtagccttgccactcatacttgtccgccaataacgataagacaatgggtatggtcacgtgcctgtttagtttttctgccatctccgtttcatcgcgacaggtccgataaatctccctttctcctgttgccctcgtgttttttacaccttttttcctttctctctttttctcggcttggtcgaggattgtaggacagcgtgccgacgcggtcattctccgtcttctatagcggaacaatcgcactgaacatccatcattgcggtgtcctgtttttctggctgtcatcgttggaaagtctgcatttatcttataatctacgcttaatatctttttctttttgagtcattatattcttattcgctttcaacctccaaccttcgacttccaatcctccaaaaggccaatttcatgcatcatgttatcccgcgtggcttgccaaaaaaatgcctttcttcacttgcggagggctcaagccttccgagcatcgttccatctgccaacaacacgttttcattcatactcgagtaatcggaactcacttttaaatctgtcgtgcaattcgattcacgatcgtccgcgcaatccgtctccgcaatcagaacgttatcttgctacagccgccgagcattctagcatcgatgggcattcacacgagacttacgaccacttcatgcacatgcccttcgagaacttcgatacatcatccctgatcatcctcgactcgacgccacaatcggaatccaaagttttccgcaggaggcatggtgtcggcggtgatgaaatagagatgaaggccaatctagagctctcattgaagattggggagtttgagcgagcctctaagttgattacccgccttggtcattatcatccgcctggctcggatgagtatctcgctatccataaccgtttcatgagacatatggtggcgtatatgatcctcaaccggcagcaggacatggttttgccgttgcaaaaatggtttgaagttgatatgcccgccggtggcgtgacaccggatgcaatcagtttcgcgattatgattcgaatggcgctgcgtatgcttcatggatcgaagcgcgacagaactgttcgtcgatactgggaacttgctcaaaacgcgggtctggaggaagagcttgtcggcattgaggtgcttgaagactctgatgttggtgagctgtctaaggtgagcttacacttctagtctgtactctgatgtcctgctgatgttctccatctagatttgttcctccgacatgctggacttggtttcgaaatatatggatctctccgaagccactgaagtgccttcccctatcgtcgataataccccccaggtgcaagctgccgaccaaaggggactgggactggcatctctcaaacagtccctgtctctcttctccggcaattctgatgtacgtttgccggaaggtttctcaggcaccgaagaggaaggaaaggaattgctttcaaatttgaggcaaacccgactcgaatccgacagtctcgattcggccctctggcgttggcgtacagataatgccgagagacaaaaatccggattcaatgtcgcttccgatgagaaaaagcttaacagaatcatgagcgaatggcacgcggaccttgtgacaagaattaaacaggagttggcgcttgttaaagagacacttgcgaaccgtatcgtaagtatcgagcaaaaagagcgctgtgaatacggtgtgtttttgcaagccctcgatcccgaccggttagctgcactcactcttttgtctgtgatgtctactttcagtcgtcaggggatggataagggagtcaaactttctgcgctcgcttcagtagttggaaaagagttgcaagatgaactcattgccgacacctatctgaagaagagtaagtctatggatccgtgtcgtctaaaggcactgaagcagaccctcgcaaaccgcaaagacaagcaaggccgactgcgatggcgttcgctcgttcaaaaaatcaacgcagaagatgaatctataatctggggctctcgctcacaggtcaaaatcggtgctgttttgatgagcatgttagtcgaagttgcgaaagcctctatttggaccgaggatcctgtcacaaaaaaaagaattctcaatatggcaccagccttcgaccattcctatgagattaacttcgggagacgatccggtcatatccacatgaatactaaactagtggaaattgttgccaaggagccgcccgctgagctgttggctcgccacctccccatggtttgtaagcctaaaccatggacagggccaagaactggcgggtataagatatacgagtccaacctagtgcgcactactcccggtgaactactgcaaccagcgtacctcaaagctgtcttgaaagatgaagggctgaaagagatccgagcaggccttgatgttctcggtggcactgggtggaagatcaatcaacaagtctttgacgtgatgctcgaggcttggaatggcggcgaagctgtggggaagctagctcccttgaatccagacctgcaaacgccagagaaaccaagcccagacgccaactatgaaacccaaagagaatggcaccaaaaggttcgtgaaatcgagaaccttcgctcaggatttcattcggttcggtgtttccaaaacttccagcttgaggtagcgcgagccttccggaaagaggtcttccatctgccccataacatggatttccgcgggagagcttacccactccctccttacctgaatcagatgggggctgataattcaagggggttacttcttttcgctaagggcaaggcgcttggggcatctggcatgcgctggttgaaaattcagattgcaaatttgtttggatttgataaagcgagcatgtcagaacgggagcaattcacaatggacaatctggatgatgttcttgactctgccaacacaggacttcatggacgacggtggtggcttaaggccgaagatccatggcagcttttggcagcgtgttgcgaactccgcaacgccttgcagctttctgagcccacgacatatatctcccatcttccaatccaccaagacggctcttgtaatggacttcaacattatgccgccctgggtggtgatagtgtcggtgcccagcaggtcaatcttgaaccatctgaccgtccttcggacgtctataccggtgtgtgcgaatttgtcaaggaagctattgcacaggacgcagccaacggcgatcacttggctcagcttctcgaaggcagagtgaccagaaagattgtgaagcagacggtcatgactaatgtctacggcgtgacctttttgggagcaacgagacaggttaaaaggcagcttattgactatctccctgatctcagcaacacggagaggaacagcgcgtctttctacatcgcaacaaaaatctttggcgctctcggatccatgttcaacggagcccatgagatccagtattggcttggcgattgtgcccaacgcattacacaatctgtgacaccggagcaaattgaggagctcacgcaagcagcattggtacccatgaatgaacgcgacgagcatttttcgacgtccattgatccagaaaaatctttccggtcaactgtgatttggacgactccactgggtctcccagtggtccagccatatcgcactcgcaagacgcggcgtgttcagactagtttacaagacatcagtctcgttgaccccggcgctgatgatgttgttacaaagcgcaagcagcttcaggccttcccaccgaacttcatccactctctcgatgccacacacatgatcatgtccgccaatgcatgccatgaagcgggcctaactttttccgctgttcatgattcattctggactcatgctgccgatatcgaccagatgaaccttatccttcgagatgccttcgttcgcatgcattccgatgatgttgtcggccgtctcggcgctgagtttagagtgcgatatggcaagaatatgttcctggccagaatcccccgcttcagtgccttgggccgggcgatctttacacaccgctcccgccataagattactaaacttcaagagttgatcaacgaaaaccgacgacaaaatctactcagctcggaagatccagaggatcaggccgagggtcgtgctatggtgacaccctatagtgtctttgaaaacttagggggtaccgactctgacctgactaccttcaaaacgatgggtacgaactcaatcgggtacattccagacgtccttccggatctggaacgtatgccgatagcatgttcaatcgacaccaacgatccggccatcgagagcctggtcggcgacctcgagatgtttgagacgaagcaggcctcacgtgacgagatgtcccaagtagaggatgatgtccatggtgaaccctccgatcagaccgaggaggacggtcaaactgagcagacccagccttctgcgcggcgacgtcagtctcgccacttgaccacgtggttatggatgcctctcaaatttcgtcccgttcccaagaagggcgactgggacctgacccgaattcgtgaaagtgaatacttcttctcatagttttctcatcaccctgggaattaccgcatttccgctggcgtttatgcatacttccacattttgttttagccatttctagagtgctgtggaggagtgacttcgggattcatttagctgacttgtaatttcctgcatcgtttctgcccgattaccttctgggcttcattggttgcatctgtacattacacatgggaagaaaatagtatatactacctgtatgaatatgatattgaacttgaagaactactctaccgttgtctcatcagaaccctatatattacctagtgacccctcaactttaaagcaaataccggagtacatactctcaaagtgaatttaggcaaaattcaaaagaaaagcctaaaaccaacagagagtggccaagcaccgcggatctagccgttttggagcgtcttcagctccctatagcaagtgtacagtgtatactttgccgagctttcgaaagcaaacggtcaagttcgcgtctaaatcatgtactctgcactctatgccgtagaatcccggaacttgtaaatgatccagtctgcacaagaattatatccggagcccgtactttgtacaaatatgcattgttctcccccggtgctaagaccggggttatgtgaccgtagccagatgaggggttcaggtccgaagtattatgcacgtagtctacattttcacgtatctaatatctctagggctacaatacgataaacgttgcttgttgtgccgtatataaccaggatgttggtgtgaaatgtggggaatacggatacatatacagagtacggagtacatacacagaaagcgagcaaagagactttgtagtttcatttgagacaaggcgccttgggagctaaaccggatgaaagctctggatacaagtgtatctgtgtttagatggatatgagagagatatatatacttcctaaaccagtgacaccacgtgctattgccccccgcctttgcatgccaatttccccagattttcggattttctaatcttctgaacctctggacttctggacttctggaattcatatttctggtcttccttttttttgggcggtctacttctaattgtccgacttttttttatctcttagatttgaccttctaaactgtgcgaaagccacgctttgggctgcgccgagggggaaaagaactcccgaggtcgcacgttctctccccgtctttctgcaatgccgttgtgacttctcggtcattctctatactgcatttgactcaatcctttggttctggtagaccagagagtctaggttcccttgatctgtccctctatgtcgccatagccctgcttttgcctcctcggagaagcatgcgatgacctccctctcctccgccaattcttactctcccttttcgtcccaagcaggacggatgacacaatcccaaacccccggactggatacgcttgcggaggggtcgcagtatgcgctggaacagctccagttaacacgtgaagccgataccgctgacatcccaaccgatcccggtcactctcgagactcgaagacttcgcgacattcccagcatcttctctatagcgaacgaaatgtttccaattcagatctcaaggatccagaattgcgcgattcccttgccgaagctcgctctgctattcgcaaaaactcatccgcgaccccagcccgtcgaagaatcagtcgagcctgcgatcagtgcaaccaattgcgaaccaagtgcgatggacataatccctgtgcgcattgtgttggtacgacttttccttcctaccggactctctccatttgcgcattggttgaactaacggttcccagagtttggacttggctgtgagtacgcccgcgagcgcaagaagcgcgggaaagcgtccaaaaaggatatagccgccactgggatcaacgacagtgatatgggtagtaaccaaaacataacgcataccaaagggcaggcctcaaaaggacagtctttgcacgaatccaacgaacattatgaccgcgcctttgatgctgcgcggactctaagtggaggcgcaaattctcggtcgcataacgcggaggtagctggattgtctgccatgcgccaaaatcaagcgctcgtccaagcacctcctcagcagcagatgagttccaacatagcgggcatgccattcaataattatgcagcgctccaagaatctcaccgaccttcgatgtctgtgtcagatatgcgctctatgcagatgatgcaaaactcgaatgggaaccctcggtcgccaggtacagtgcttcattctcaaggattcggttcggtgtataatgatagcacataccctttgatgaatacgcaagatgcgaatccgagctccatgaatcatttccgcattgggaactcgacggacaacccatcggcttctttcattggattctctcctccagcgcagtcacctagctggttgccactcccttctccatcacccgcaaacttcccttccttcagcatgcctcctttctctagctcattgcgatacccagtcttgcaaccagttcttccgcacattatgtctataatccctcaatctctcgcctgtgatcttctcgacatatatttcaccagctcatcgtcctcacatctttctccatcgtcgccctacgtggttggccatgtcttccgcaagcaatcgttcctacaccccacaaagccgcgagcgtgcacccctgggcttctcgccagcatgctgtgggtctcagcacaaacaagtgaggctgcatttctgacatcacctccctcagctcgaggccgagtgtgccaaaagcttctggagttgacgattggcctactccggccacttatccatggtccagccaccggagaagcatctcccaattatccagctaatatggtaattaatggagtggctctcggtggctttggggtatctatggatcaattgggtgctcagagtagtgccactggcgcggtggatgacgtcgctacatatgttcacttagcgactgttgtctctgctagcgaatataaggctgcaagtatgcgatggtggacagctgcctggtctcttgcacgagaattgaaactcggccgcgaattaccgcctaatgcggcgacccgtcaggacggcgaaatggagggcgagggggacattgatgtgaatggcaacaagaggcaaccatcctctctgttaagccacggctcaggtaactctgcgatcaatctcacagaggaagaacgtgaggagcgtcggcggatctggtggttattatttgcgacagatcgccatcttgcactttgttacaacagacccttgacactgctggataaagagtgcgagggattgttacagccgatgaacggtgatatctggcaagcgggtgacttttcatctgtcaactaccgccgtgctggcccaccctccgaatgcactggccatagcatgtttggatattttttacccctgatgtctatcctgggtgagattgtggatctgcaacatgctcgcaataacccgcgcttcggtccacatttccgcaacagcggtgagtgcgaaagtcaggccatggaaatccgcaggcagctcgatgtttacgcccagagcctgaaagaattcgaggctcgatataccagctctattgccctcggcaccggtgaggccgacacagccatggaggcctccaacatcaaccatgtcagcccatctggtcggtctattagcaccgtaggatcgcatgtgagtgagtccatcgttcatacgaagatggtggttgcctatggcacccacattatgcatgtactccacattctgctggctgggaagtgggaccctatcaacctgctcgacgataacgatctctggatttcttctgagtcctttatcaccgccatgggccatgcagtcagctctgctgaggcggccgcggaaattttggaatacgaccccgatctaagcttcatgcccttcttctttggcatatatcttttgcaaggtagcttcttgctacttttgactgccgacaaattgcaaggagatgccagtcccagtgttgttcgggcctgtgaaacaatcgtccgagcgcatgaggcttgcgtcgtgactttgaacactgaatatcaagtaaggtttacccgtgacatagccttagatttacagaagctaatatcctacagcgaacgttccgaaaagtgatgcgatctgcgctagcacaagtccgtggccgtgtcccagaggacttcggcgagcagcagtcccgcagacgcgaggtgctagccctttaccgctggagcggcgatggcagtggtctcgcactttagcaagactgctgaatatctgctgagattctttcggctaccactcgtcttgattttggatctatttccgttttctttgtcaataattttgattttaatttgcgccctgtatactatatttcctggattttggacataccccgaggagcgaaaaggcgcacagtattctgatgtctatatattgactcggcatatactatacctagttgaatattgattttttgtttgattttgggaatctccttcgaagagaacgtattcattttcttttctatactcccaaggggcccatctccttggtaaggcgtctcatttttgccgttcttctgttcgagagtggaatttatgtcatgtgatgaagcttatttcggactccacccaagctacgatcctcctctgctacacctgttcaatctcaaccaccatctatcccaacaaatgaacgtacttgagatcacaaggccaaaaaaatgaaaccctatataggcatacctcttgtgattggacttgtctatcgagcttggtcgcgaaaatctcttaccccgctcggcctggtcgttgcgggatgttcagcctccgctcacgctctccacccatggtcggcaccagtcgcgctccttgcggtattctattttagtgggactaaggttacaaaggtaggaagcgacctgcttctcaatttacataaattatgggcgcagcttacaagatcgtgatgataggtaaaacatgagatcaagtcgcatttgacactctctgcaaccggtgcggaaggtggcgaaggcccccggaaccatatccaagtcctagcgaactctgttgttgctaccatattatcgatcgctcatgcggccatcctggctaaaacagcaggcactgaatcgtgcttctcactcggccagaatgcggctgatatattaattgttgggattgtagcgtacgtcactcaacttcactttctatgcatgcattatctgttctagagcatataactaaccggttcctttttgcagaaactacgccgctgtagccgccgatacactctcctccgagctcggcattctctcgaaatccaaaccccgcctaatcacgtcgttgaatctccgtgaagtccctcccggtacaaatggtggtgttaccgcaactggccttggagctggccttctgggttcgttcattgtttcagcgacatctgctgcggttctcccgttctgtgccagtgccggattgaaggatcgggctctgtggaccatagctatgactctctggggtacgctaggcagcgttcttgacagtgttctcggtggacttttgcaggccagtgttgtcgataaaaggagtgggaaggttgtagagggaagtggtggcaggaaggtgagttcacgattatgtgtccttgaccactctgtgcaaacatctaatctattttctaggttatcattcacccttcgacgggcaagccggttgttactgctgatagcactgccaaaactaccggtagcatacataatgctgcagtgcatggcacccaggtgacacacgtcctcgatgaaagtcacgaaagtcgtcgccttgaaactggtcatgactggctagacaacaatggcgtcaaccttctcatggctgcgactatgagtgtcggggctatgggtattgcacagtggttctgggggttggatgtgtttgagttgctcgtgtaaagtataacagacaatccaggtctcgaacatgcttattacgttcctgtttatgtttcgggttggttaagatcaaaattatgatgaatatatgtctttctctctttgtcttctgaatgtctctgctttgacaagcgtgggccagctttttgtttgtgctagctgcttccaacccaccaccttcccacctttccatttcgatgaactcagccggtatttgttttctttcccttccacttctcttttcctctttctgtgttcccttcgcgtctcaataacaacaccggccttatcaagaaaagccaacgtcaccttgcctcaaccgacacagctcatcacgtgttactgctggccctagttcatgggacccttccatgcatgtaccgagggttcataagctctatctcggatttggaaaactgaaaaccaacaaccttagcgcaaacagagcacgccagccaagatgtctactgaagaagaacgaggagtgcacgtccgagtcacaaagccaattgtctctttcctacccgagaccgaaacatccaagaccatagcatatgaccttcagcacagtgacttgcttcctgtgtatgactacgtctcctgggaatatttgatggccggcgtcgccgttgagaactcgtactgtacacgtcttcttcttcgtttccctgcagatcctgccagattctccggtctcgtcgtcgcggaaccatctcacctatggggtggaacaaccatctggcgtctcattaatcggtggctgatgcgcaatggtgagttatcattcgttatagtttggtgtgttgcccgagctaatactcgaaaggacacgcttggctggaaattgattcgcaagctcccgcggcacttgaccagatcaaaaacgttgatcccgaacgctacaaagacatgcactttatcccttgtcagaccttgaacgagttttccagcagcattccctccttcgataacgcagaagagctgtgggataattacaggatcttcaaggaaagatggtgggccgcaactaggcagtctccggagattcttgttgctgcatctcatgctttgagatctggacagctgggtatcaaggccgagcgcgtcatactaactggtctttcccagactgcagacttgatcagaaagttcatcctcgagtctcttcatctccgacttcctgatggatgtgccccatttgaggggtttatgccatgccaatgtgatgccggcaacccgctcccagacttgcacgatgcaaagatcattgaggttcttggtgagttcgagctaatttacatcaaggcactctacggcggaaagaaagagccttcccatcgtcgtgctgatagcaagtcattccgactctacgaagttgctggtatgtcgcatcgcgagacccgatatctctccatggccgataagaagcgtttgttggctgtggatctggaaggtgcccagtggagcactttcgcgaattctttcatttatcacgcactctttgatgctatggacaaatggattacgaccgatgttgctcccccacgaggtacaacaatagatatggacgaatccggggagattgagcgagaccagtacggaaatgcgcttgctggagtcagaactgttcatacagatgtgtctactgccaaaatcattgatgttacccctcagccacatcctcattggcacactggtaagtttctcacgtccgcgagaatctctttcaattgttctaacttggttataattgacaggcaccgaggtccctttcaaagatgtcaagttgtgggctgtttacaaaacggtagccaactatcggcgtcaggcgggcgaagccatcgagcgacagatcaaagctgggtttctgctgccggaagacgctgaagtcctgcgtcgcgatacgattgagcaagtttccttctaaacttgtcagactacagtacttgtttctcatcatggttctggagtgttatttggatcttggggcctgaagcttcttaggaacacagttgtgcaagccttatgtattatcggggtgcccttgattatgttggatggatttgagaattgtgcgcttctgcaatttcaatgtcttcagctaggccttgaatatctaccttcatgtcaatgtgcttcagttttgctatttaaatagtgataccgttcttcgttggtggagatgatttgcaaacccacatgaagatcccacgagacgcaaagccttgaatcggtttaatttgatctacaacgggctatatgcgagtggtatagagacggtagcaaaccccccttatttgggtcaggaatgggatttatatgagaaaatgtatgagcctaagcgcctaaactccgatttagaatgcacttcaagttctaggtgctgaacagtaatgatttcgctgatccctctgggtagtacaagtttcagcaatatgacatattcactaatacatatgcaatggctgtattccactagcccttggtctacattagcaaaaaagaacatccgataaagataattgaaacaaaatcctctgcagaattacaaaagcccaaccatagtgcccaaccatagtgtagatgttgagtggaacagtctgcagcacgcacctcgtggttagcaaagatgatatctaatctatttcactagaaggcataattacccgacagaaagcgtccactaagcctgtccatgtccaatcccttgctccatcacccccggtgttttgacatatgccggggcaggttgctggaccggggtgtatggcacccattgctgtacagggggtggttggaaggatttctccagttctctttctttcttcttgcgatcacggcgcatcttgatgagaaggataataacaacaacaatgacaatgatgataacgattgggatgagaatcgctttgagcaagagttttagaagacccataatgtaagattgcagtatgcgagtaggtggcagagcctggtataatatgatgtagaaaagatacaacttggatgggtgaatcgaggagacttttataccccgacctgctcacgccctgactctgtgtgactaggccacgtcgtatcaacgagggcatgggcgcaatctacatgagcataaggaatagcgcagcgctaaatggtgatatatggttggcggccagcctatgaatgtgctgaatttgatatggaagcacaagcagactttgttaggctgcatcagacgttgcaactgtgattgatcgtgcatgattgatgtttcagtatattttccaggtcatgccgttatgtctataaatggatttgttcgaactgtgtgactttgaacagcgtaagcaatagttcttgtatacagacaatacagacaataaaccaataattcgagcaaggaaaacaggagattaagcggaactctgctgcctggtccttttctctcggccgatcatccggccacaaattgattacattgctatggatatctacgtgatgctcgactttggtctgctgtttagagatagaaccctttagactaaggacttaataggcagaccttataaccttctccgtcagaatagatagcaagccaagttgattgaattgatcaaaacgattcaattgaaattagtccgttcatctagttacagcgccaagtctcagccctacgaggcgactccactatcgacggcgattcttgcctgtcctgtcactctaaatatagaactgcttctacatattgtacggtttttgagcggcagaaacctagacttatattttgtccgaatgtaatgtatgcaactaggaatcattaattcgtgaccctgcattctagacgaagggggcatcgactgcgtctgggtgcacgtagaatgcaattgcgattatcaaatacctaaatcattagcatcgagggtagccagaacactcatgggggcactcacgttccaactaatagagacccttcgtagtaattggatcgacctccgcgaatcaagcagtccatgacgatcaccgatagaaagaataccacagtttcgaagggactgtagcgcaaagacatgggctgcccaataaccaggccacatatgaccaggaacggactcacaaacaatgcaatctgcaatgtgcttcccacaataacaccaattgcgagatccatattccccttgatcgaagaattgacgacagtattgaattcacccgcgttaccgacaatgggaaccacgatcaggccaataaaagcccggctcacatgccacttgtctacgaagccatcgacgctgtccaccagacgatcggagcagacggtaaccccgagagttgcaaggatcaaaattatgcttgccgaccaggggcccagaactcgctcttcttcctcttctttttgatcgtcgacgaatagctcagcgtgactcttcaattgaaagtagagatagaccaggtagaatgtgagtaggaccacggaggcggcacgggagagactcaggacgctgacttccacttcgtgggacttggacggtatggttgaatagagcacggagggaatgatcaatgttgcagatgaaaccaccatcaaggatgatagtatcccactaacatccacgttgaacctcaccacatcttttgcatagccgccgcagaaaaatgaaacacctaggatctaaatttcgtgtaagcagacaagatcaccgggtagtgaatatgcaccaagacccagacctaccagtagatttcctgacaggatacttcccaccatactggactgcacgatgctgatttctccctgtcggaccgcagtgattcccacctgtgtagcgatcaacgtcagtttcccaccttaacagagaacaaaacgtcgaaacaatccaaccacttacaatcatttcaactgcatttccaaatgtcgcattgatcaaccctccaacggtttgcccgacgctttttgccagttcctctgtggcaaatgacagcaacgcagcgagaggaagaatcgccaggaagttgaacacgaaagaaatcgaatcaccccatccttggccccccgcaatgattcccagaaacacgaatggaagtagcaaattggtgtagctgcatcccagggtagctttaagcacacggaacagagagttgcctaggaaaagagcgcacttcgagacggggtggtttgtgtcacgcaactctgcagattcctccccgtggctttcgcattcagtctcgtctctaagtaatgcatcttgctcatgggctgtcgcgttggcttcaagcggtccggccatgatttcagggtcaatcttggttgactttcgcagtctagggtgagctgtgttgttcatattggcaggagtgaggaaaaagaccaagaaacatcgtggagaataaaagggatggtgtattgctccactgtctctcagccatagacatctgcgtacgggttagtgtaaccttacagataaaaatacatgtatgtttcagttaattacgtttatattacgtatttggctgtatcggtatggaaatattaatgtgatacactgagcctcatttgttgacctgtgtgggctttctcaagacgggtaaattctctcagcttcatcttttccctcgatgaatcatgtctcccaatcgagcttcacctatgctatatttcaattttatcatggcacaggtccatccccacctgcgcctcttgtcacttttgatacctctcatcggtatcatagcaggagccctcaattggaacagtgttgctatcttcaccctcaacatcgtcgctgtgattccgcttggattatgggttaaccgatcagtcgattcgttgactgtaggtggcagccgagttgtcaatgaactgctgaaatcaacactgggaaattcggtggaattgatggtgatatctagccctgggggattcaagcttcaattcaaacatatgctaacgacgattgatccagatcggaattaatgcgatcgcgcaaaaaaaatcacacatctcccaatctgtgatacttggaagtgtcctgagcaatttactgctggtaataaatcccagtatcaaacccaacaactggtgccatgaacctccccctaatacaatctatatctacaggtcctcggtggcaccattttcgtctcaggatacgaccaaaaacgactccgatttgatcgtaccctcacaacaatcctctcatccctcatgatggtcgtcttcatcctcctcgccctcccaaccataatggaggtcttcccatctgccaaagccacccctgcagaccacatactcttaacacaacgcatagcggccattatactcgtcatcctgctcctcacattcctcattttccgcctcggcacccatgcggccatgttcgctagcaccccattcagccagcgagctcaagcccacggcggccggtctcagataatcgaggcccagattccacagccgtatattggcaaggcttcagcatctatgattctagcagctgcatccgcgtccgcgcttgcgtgcacatattacatagtaggttgtttgggtggggttgcttcaatcacgggtatgaatcagtctttccttgccgtgacagttgttccactggtcggaaactcggttaagtaccgccgcattgtgatggggtcccggacttacaatcagatcgagcttggaatcagggcggttgttaacaatgtgttgcgggttacgatgcttattgctccgctactggttctcgttggttggggttttgaccagccgcttattctgagatttgatgggtttgaggctacaatgcttttgcttagtgttgtggtgatgacctatcttatttctgatgggcggagcaattacttcgaggggttgatgttgattggaacgtgagtcgctcgcactactttgatggactttgattcgtcggtattaactttactttctcttgatagatacatgattatcacgttctcgttctttgttaggcctgaggtgccggcgaatgtgatttacctaggtggttagcctggtatatcacacatgagtcgttacttgaagtggctgctggatgcggcaaatcccttgagccatctagtgtgcatagaacgccacaaccaaacttgaatagctataatcatacatcaataaaagtacttttaaaaatcagtaaggagtctagagaaacttacagggcaatcagcatcgcaccatggatgtaagcgtactgtccatcacgaagtagatgattaaccaccagaatggccaaaaacatggtcacggtctggaatgagtcgaagaaaagcgtcatcggttcagcaatgcaccagccaataaccaccaagaatggtatgacaaatagaccaatctgcaagagactgtcgatgataacgcggattgcagaatctgtatctcctgtgcgagatgccgcaatgacagtaaccccctcggtgctattgctagcgattggaataaagacaattgctatgaaaacttcagagactccaagcgtctttgccatgtcgtcaacactttcaagcaggagttctgtgcaaaagactgttgcggccacggctgttgtcaatcggataattgatgaagctaagctggctttgttggctgcggatgatgaaactacgttattttcatcgtcactagcttcgctctcaattgaaaggaagagatgcttgtgagtgccgaggtagaagtaaaggtaacctccgtagagcgcgaggagtaccaatgatgttcctcgtgagaaggatagtactctgtcatcgatctcagatactgggaaagtcgaatacagagccgttggaagaagcatcgtgacggctgtgatcatcatcaaagaagacaaagtctttgcaagagcgctgttaaactccaaaacctccttgttgtacgaagctgtgacgaggcagcaaccgaatacctagattgagctgtcagtccggatgatatggccaacactgggactttcataatgtgaggacttacaagcaaaatatccgagagaatactgccaaccatcacagactgtgcaaatgggatctcgtcatgaatcagagctagaattcccgcctgggctgagtgagcattttgtcatttcgatattcagggcaatattgttactcaccgtgagctctaccgtatttccgagtgtggcactgagtagtgcaccttgcagctctccaagatgcgcagtgagttcatctgatgaggtggatatcgcctcggacaagaagataatggcgaggatattcaccgtgaggactatgatcgggttccagtgaaatatctttgcaagcccagccagaggtagcagcaccattgctggccgtccatgattgatgctcagttccttcagtccattttgcgatggcatcttgaagaacctctggatgtgaatccaagggtcctggcgatggtggctaggcgctggctgagtgtctcggcgagataccatggtaaatcttggatctcttggattgttgaagcttaagtgagatgcgacccgcggactgggaaatcacatgaactggatatttccaagattgtgttccgaacgttaccacggtacaagtacgggtactagtaactttcagccttatcaaagttacagccctattactagcgccaaacggaacggtctccaccaggaagtgggcgatagggctgagccggtatttagccgctggatacttttcaatagctctgtatacaacttacagtatccaggcaacagcatttatttgatcttcgtctcagccttatgggatgttctgacgtgttaggctataaatactcgaaagatcatgtgcaatgacgtttaattacagggaaggggaacacaagtcttcgttgacccctctctgctgtgtattgtaattaatcggaacattcggggccccccacaccttggcaatgcgttcgcagctcacaattcttatcttcctctcaaagagtcgtcacgctcaacccatctagtgacaacccaacctccgacccgagtaaatgattaagagccagcctaccggatcattcacaccaaaacaacaaaacaacaaccggggccaggctggataatccttgctgtccgtgatctatggataatcatcctccctccctcgagtcgctccagagggaggttagtgaactcacagccatatatcatggccgaggctggacgaccgaagcaacagaactagagtcagcaatgaccacagcggggaaccggatactcgcgacacgtgcggattctgaagggatgaaaataatgctcgaagagctagccgcatgtgtcaagacattgctgcaggccaattcatggattgttgccgaagatctaggcattctggtgctggactcatgcgagaaacttaagggagagcaagacttaatgactatgacagcgatgcataatcttgcttcggcgtattggggccgaggccagctggatcaggctgctgctctcgcttcctgggtgaccaagttgagacagaagattcttggagaggagcatccccagacgttgacttccatgaccaatctagcttccacctatcggagccaaggcctctgggccgatgctcaagaacttgatttgagagtttttgagatgaagaagaagactatcggtctcaaacattcatccactttaggctcaatgtctaacctggcaatatcgtatgcctatctcggtcggtatgaagaggccgagacaattgcacgccaattggtcgatctcggagaaagtgaattatctccaaccgatgcctcgttgttaaaatggaaacttaccctggcatcgacctaccgagaccaggggaggttagactccgctgaaaagcttgaattggagattgtcgctgttagtcgggacatatttgggacgaatgatcactttaccttgacctctatggccaaccttgcatccacataccgcgaacaaggtcgatggtcggatgctgagcgcctggaaaaagaagtcgtggctagcagcgagaccgtgctcggcgaaacgcacccgcagaccctgatgtccattagcaaccttgcctcaacataccgcaatcagggtcggcttgaagaagccaaagacctcggggagaaagcaacgactgtaatgaaagaggtcctcggggaacgtcatccacacacactggttgctatggcggatcttgcagtgacattccaaatgatgaggcaatcaccagatgccgagatcctggcagcccggtcattacgtttgatgaaagagacgataggcaaagaccacccgtatacactcaacgcgatggccaatctgggcttcatataccagtcgcaaagcaagtgggacgtcgccggtggaatggccgaaactgtatattctcgcagggaaagagcattgggaacggaccacccagataccgtggcagcgctagaggatttgaggagaatagcgtgggtagaggcggcggatcagaattcacagcgtacgttgaattagactctcttttaggcttggactgtggagaggtgtcgactgtccccagcgccattagtctgtatctagctagtgtcagccaggtttggcgatttttaatcattttttctgggctcagtgaccaattgtcaagtcttgttgtctgccagtcagccagcctcgggcatttacatagcctccttgccaagacttgagactgtcaacaatcttcttgtgtgatctctggggctttgttttgggggagtacaataagcaacacagccctgtaagaaattcacttgcctgctctggggtggactttggttaattgtatggctaacgagttcagagcgcttgtccaacataggcatgactagttgagtcagaagaactaaaaaggaagacttcatattgatgacctataacgcacaaaataacatcaaaggaaggtaacgtgtcttccagatgtcgctgtaccggctccgatacatatctcttgcagaaataggtggatatcatgttatgatactgatatcttgtctcttggtatgcatgatacgccaactgtattttacaatccctttttacgtatttgtatttcgccagacaggtgcacctcctttctgattttgtccatctgatcctcccatgacattatccttgacatgacgccaatttcgggagccaggaggccttatatgtctcttttttggtcgcgaatagtaagttcaacgatgagcctgagaatgtgtcttactgacgatacccagaacccgcgatcaaaacgtgccacgaaacaattcactcaatcgttctcgacctttcccctggatcctgacacattaggcaatcttgtgttgtccaaagatgtccaagagttccatgctattggtggcgtaacaggcttggaggaaggactacgaaccgacgtccactccggtctgagcctggacgagacctacctaggtgctcccgcgaacatcgctgcgagtactataagcactgcgccgacagaaaagaccgctatctctgagcttcctatgtcgataaatcttcatcgcgacgcattcgtcgacagaaggaaattcttcggcgacaatcgcctacccataaaaccatccccgagctttctgtcattgatgtgggcagcctacaacgatcacgtcctattcctcctaaccggggctgctattatctcgcttgctttggggctgtatcagacattcggaaccaagcatactcccgacaacccgcccgttgaatgggtggagggggttgccatccttgtcgctatcgtcgtcattactctcgccggtgccgcgaacgactatcaaaaagagtgcaagtttcggaagctcaatagaaaacagcaagatcgcaatgtttgggttcttcgatctgcaaggattcatgaggttcccatctccgatgttgttgttggtgatattgttcacatcagtcctggggatatcgtacctgctgatggagtattaatacgaggtcatcaggtcaaatgcgatgagtcctcggcaactggcgagtctgatccggtcgataagacccccatagatacccgtcctggtggctctcgtgagatcgaccccttcatcctctctcataccaagatcgtggaaggcgttggtgcgtacctcgtcttggctacaggcacaaaatcaagctacggaagaatccttctctctctcgataccgacccaggcttcaccccgcttcaagtgcggctcagcaatcttgcaaagaatattgcccactttggtgcacttgcggcgcttgtgctgttcgtaatcttgttcatcaagttctgtgtcggccttcggaatagcaccgagtctgcctcggaaaaaggacaatctttcttgaatgtcttcattctggccttgaccgtcgttgtgatcgcagtccccgaaggacttcccttggcagttacactcgccttgtcatttgccactactcgaatgatgagagatcacaacttggttcgacaactccgagcatgcgaaacgatgggacaagccacggatatctgttcagataaaacgggaacgttaacacagaatcaaatgactgttgtctcgggtttcttcggtgttacctcgcaatttactgatcgagttagcagtccagacattttagatgaagaaagtaccttgtctgtggcaaaatgcatgaaccatctctcgagtcaatcgagatcgcttttgaggcaatctatcgcgattaactcgactgcaattgaaagccgatatggcggaggtcggcagtttcttggttcccaaacagaggccgccttattgagattctcccaggactatcttgagctaggtcagcttgaatttgatcgcgcgagtgaggaggttgtggatgttttaccttttgatgcttctcgcaaatacatgatcacagttgtgaaaatggccaacggggtatatcgatcatatgtgaaaggtgctcccgagattctcattgagaaatgtgtggccacgattgcacagccaatgcaagggcttagtactgctccaatcacggagtatggtattgaacaaatacgccagacaattgctcagtatgcgtcacgatctttgcgcacgattgcgatttgtttccgtgatgtagaggagttaccttccagagacgaggaagaaactgtcagcttcgaggatctgatgaaagagttcacatttctaggaattctgggtctacgagaccctctccgagccgatgcttggagtgctgtcgacaccagtcataaagcaggtctcactgtacgcatggttaccggtgacaaccttctaacagcaagggccatcgcagaagaatgtggaatcatcaatagtcctgatgatcttgtgatggaaggcgataagttccgtgcgctagatgaatcacagcagaaggagctagttccacggctcaaggttcttgctcggtctcgtccagacgataagcgggttctagtccaacgcctgaaggatctcgggagagtcgttgctgtcactggagacggtaccaatgatgcccctgcccttgcagttgctgatatcggattctcgatgggaatatctggcactgaaattgctcgtgaggcttcttctattgtcctgatggatgatacattttcttcgattgtcaaggctatcatgtggggaagagcagtcagcgatgcggtcaagaaatttttgcaggtaagctactctatcaacaaggagtatggatggccatcggtctaatatccattttccagttccaaattaccattaccttcacctctgtgggcctggcatttgtctcggcagtagccaactcatcgcaggagtcggttttgacgccagtgcagctcatgtgggtaaacctttttcaagacactctagcagctctggccctggcaaccgatcctcctcctcgccggatccttgaccgcaaacccgaaccaacatctacgccgttaattactcctaccatgtggaagatgattattggccaatctgtgtatcagatggtagtaacactcgttctatactttgcgggctcttctatcttctcttatcacggtgcttttcaaacatcacaattgcagactgctgttttcaacacctatgtctggatgcagatattcaacatgtacaagtatgtcgatgctaccttcaatatttttgcgttactaaccccaatacagcaatcgacaaattgagcgatcatttaatctcatcgaaggtatccatcataactggctctttatagcaatcacctgcatcatgatgggcgctcagatcctaattatgtttgttggcgggcgggcattctcaattacaaagttgactggcgatcaatgggcatattctatcattctcggcgcaatatctattccagtcggattccttctgcaggttattcctaccgtgattgttgaaaaaccaatgacaggcatgaggatgctatgggacggcttgcggcgtcggtgatttccctttctctctttctttcttgatcattcacgcgagcgtctttgaatcttgcatggccatccagacggaatagccgtaaactgactcttgaatacccattcctttctaggatccacttgctcaatatcgtagtcccttattagagttgccattagtttgagtagctcaaattgggcaagattgcggccggggcattggttgtacccagctccccactaatagatattttagttcatttcgtaaatgggtgttggcgttatcaattgcctacgtggattaaaaacgagtcgatataagtcgtctctgcttgaagccagcgatctgggttgaagctgttgcagtcctcgccgaagatctgggggttgcgatgaaagacccacgtgttgatactgagaaccacctatagatagagtcagtattcaatcaaatatcaatcagtgtaggtaaagtaaagcctatgaagttatccttactccttggggaaaatatctgccagcaatagtcatcccaccttgtggcacgactcggggaagtccaccaacggcagcagagtggaaacggtacgtctctttcagctattcagagatataagcggagataattgaagtcgactgcttgcaagtggctacttacacaggcctgaagaaatggcaacctctgcgcttcattatactgcacgataggcgagagttcaccccgactctgggcagcatcaatctcatcgcgtaagcgctgcaaatattctggatgacggagtaggtaataaataaacgcctgggctgtggcaccaacagtatcggccccggccccgatattcgcaacagccgcggcaaagatctcattctcagtcatgcgatcgggatatttggcccgaacgtccagccagcgctgcatcatatcattccttgttgcggggttattcttgcgcgcatcgatagcagcaagacaagtgtcgaaaatatgcgatgaaggctggagtccaatgcggctcagaagcgggtttcccagtgtcaggttgtgtagccagatatagtggcccatgaccgcgatgtagactgccagggctttggtgtttgcgaccgcatctctgatatctgtgcctgtttctacgaatccaaaggattttgagaaggttacttcgcccagcacgtcaaaagcgaagaagctgaaccatttgtcaaattctactacctcgttgcatttgcttaatctgtcgaggtgcttttcgaagcagtggaggattgcgtccacgtgtggctcggacttgataatgtttgatagtgcaaagccggcggctatgttgcgcgacttttcaatatgccgctttggattcaattcagacatctggttcacgtaatggtagtctggaagactgaaaattgagtaccacgagcccttttgtgcatggttgttaatattgagtacttttgcttttgcgattgtcaagagaaatacatactttggctatatttgcatggagaagctgctttactgcgtctgggtgagagacactgacttcattctctgcaatgcgaacaaaataccctgtcgctcttgttaaaatatgaaatagaatcatgacagaccagcctaccattcttttggtgaaggtcaataagctcatcttcgatatggcccttccacaaatgataaacctgccatagtgtcgaaaaagaagccaaaaatgggcctggtatatctctgatcggggtccaatatttgcgagtgatcgctcgcacagtaaacaaaatgactgctaaaacccacagcttggacaaggtgatcaaggccgttaccccagacacaagtaaagaaaccatttcaattgacagtatctgatatacacgttccacacgtaggggatgaagttttatttccggggagattgttgggaatcattttaattaaacgtgcttttgacatgggtcggtcataacaaaagtccgttgctcatagcttcccctgagaacacaatccagtattctctgccgtctagtatcaacctaagctggaatagtgaaagtagaatgttttggcgttggccgtgcctagtccttgtggggccggccttgctagcggcgttgaggtggactcggaggaaggctgctagcacatatcggggatagtcctactatctcacgatggtctgatttgctgattaaatattgtgccgcgggggtcgcgggccggagatgagagtagaatccctccttgtttggcgagaatccttagacaagttggttgcagggtagttgaattgggggccaaagtctgccttgatgaatctattcacctcggtttcgtgttttaggaatgggatcaattcttcaaatattctcttgggcacgatgtcctcttctaaatacccatcgtcctttctggcggagaatcgccgccagccggcgattatcggcatggtcgttgtgacaacactctcattacttgtcgttctgattcgcctgtacgctcgggggcatctaatccatgagctgggatgggatgacctcacgattgcagtcgcacaggtaaatttgatccgatcactcgcgacctgttgcgggattttgatgtctatctagttagtcagctggatagtcctggggctttcattaatggtcatccactatggctctggccagcatctcgcagcgttgatgaacgacccagaagccctagtgcatatgtataagtggcttgtcggagctcagctcgtgtatatgttcaacatgtggctgtgccgcatctctggcatcgctttttatgctcgtctcaatcaaatgccacgattcaccctttatctgcgtatttccttcgcttttgtgacggctgtgtatgtagcgcagacactcatcattactttgcagtgtgttcctctcgctgttctgtggggcggcgcagagggtgaatgcatgggctcagagattgttttcatttcgacttctgtactcactatcgtctgtgactcgcttgtgctgctattgccaatgaatattgtcttctcgttgaaggcaaagctagcaagaaagctagtcttagcacttgtactttgcgtgggagttttgtaagttctcttgtccttgtcttcgtcaacagtgagaaagggaagtagctaatatctgtctctttagtgctgttgtgtaagtcttcgccgccttcccagtcacggtctattagctcaccgattataggacgtctattctccggatggtgtccatgatcgtcgccctccaacacccggatgatgcaacttggtatttctctgtggtgatggtgtggtctgccacagaaatcagtgccgctatcatcgctctttctctcccggcgttgcgggcatttttcggggtcttgagcagaaatcgttcgacgatgcatcacagtgactcagataatatagggacaataggccttgagtcgattcctctatcggcaagggagcctgtatctgacggacatgatgttcatgagacgacaatcgatgtggactgggggacgagtccgagtcaggagacgctttggggtgtcaaggatggagaatatggttcgcatgggcgttgagaggccccaccccggtagacgagcatagtggagtacctttgctccgtgtttactccatacctagttaatggtcaatccaaagaaaaattgtttccatgtggctgaattcatttgaagcgatgtcttggcattgtttccgcccattctttgatgatctggtgctgttgggtctgcccacttcttctgttgaggccaagaagttttgtatgggtcacttgcgaatgctttctgaacacatggctgtgttcctctcggtgaggcagcgtggcgaaaggcattgctgaggtcggccagctgatgtatccatttggagaactagattgaggcacaccacatcatacgagcgtcagagagcaactgccaagagaactatccctgcctagacagaaatgaggtagcttagacctgaaaagcttcctcggggatagattaatgcaattgattcgttctttcggcaaacctgatggtcatgcgagttaggctcaattgaccatatcggagaattgaacagatacgaacgcctttaaagagtggagcctatcattcgagaaatccctgcatgaccgtggagttatcgtatattactaatatcagacttccaaggtttagttctgtagttcgtggcagtgattacatgatgtacattgcacgtggggcaaatcgacctgttgcacatgagtttggctgtcttggctggcaaaaactctgaaaccaaccgcactaggagctcttccaacactttccaatcctccagggttcctctttcgtcaattagagtcacatcctacaaagtacgaaggcacgtgcgctcgcctcggagctcccgatgtagggcaaggcggtggtcgtcagctcggcacccgatgtcttctagaacaaacatgaaccatgcgacagacacattccgggggattggacctcttatacacccacgtgtgggattgcagtgctctcataggtagatgcggaccgtgcgcccccacccccgccaagagccgcaaccgtccaatggccgtgtcctggaaccaatcaggggccgtctccaccgagttctaaaccaatctacacctaatctggctccttttcgtcgcatgtcaatgtaaaactacttccgccgagatattgccaagacattgtccaatttgcttcagaccataagcttgcggaaaacgggctttcttcttcttggcttggtcgcgttgcatttactttttgccaaggccacagacgatgattgctaggctcccattgcagcacgtgtggccggagtgtcccaatcgggaagttctcctgggcagaggacgttcgccacaaagccttgtcttgcatagagagtagagcggttgtgtcttatcttcccatgcatacataaagggcagccttttcgcccaggtcttggtttctcttgtttctcagatcaaaagtccgtccagtactaagctttgaatcgaaagcttgacttgatacaactcatcaagatgtatctccatcaatacgattacatctttgccatcggcacgttgtttgctatgcttgatgcattcaacaacggtgcaagtaagtagcagcctatccttggatggttgacctcgaactaaccattggatgtctatagacgatgttgccaattcttgggccacgagtgtctcctcccggtccatctcctaccgccaggctatggtcctcggtaccatcttcgagtttgtcggagctgtcgctgtcggtgcccgtaccgctgatactatcaagaacggcatcatccccaactcggccttcaagggcaatgccggtgttcaaatgctcgccttcacatgtgcccttgccgctgcatcctcatgggtgatgtggtgtaccaagcactccgcccacgtctcctccacctactccctcatctctgctgtcgccggtgtcggtgttgcaactgttggcgcttcccaggtccagtggggctggaacgatggcaagggtctcggtgccatcttcgctggtctcggcatggctcctgtcatttccggttgctttggcgctattatcttcatgctgatcaagtacgtcgtgcatgtgcggagaaaccctatcccctgggccgtgtggagtgctcctttcttcttcctggttgctgccaccatttgcacgctctccattgtttacaagggctctcccagcctgggtctgagcaagaagcccgcctggtacgttgccgccgtcactatgggcactggtggtggtgtctgccttttgtctgctttcttctttgttcctttcattcactcccgcgtgatcaagaaggaccctagtgtgaagtggtggatggtcatccagggccctctgctcttcacccgtcccgtccctaacggtgctgaagttgccaaggttcccaactacgccgtggtgcaagaggaacccgaggagcacgagtctcacctgcctatcgatgagaaggatcccaagaccggtgtttcctccatcccaggctccacggaggagcgatccattgaaaagctcgaggccaatcagctcacctaccgcgaagtcatggcccaatccgaagagcgtcacaaggccaagctcctccagagccgtggtcctattggctgggctatgcgccttctccgcgacaaccccatgggcgctggtgagatttacgaactccgcaacctgaagtgcatggccaagcgcatccccgccatcatcactgtcggtcttctctatggtttctactacgacatccacactgcccagagtggtaacgagggtactccggagggtgagcgtatgaagcgtgtctatgccaacgccgagaaataccccaatgaggtcgaacacaccttctccttcatccagatcatcactgcttgcactgcttccttcgctcacggcgccaacgatatcggtaactctgtcggcccctgggctgccatctactctgcctggtccagcggtactcctgccgcgtccaagtcccccgtgcctgtctggcagcttgctgttctagccatttgcatttccatcggtctttgcacttatggatataacatcatgaaaggtaagcacctcttccttccacattccaatcttcatttttactaactttaaacttagtcatgggtaacaagatcacctaccactccccgtcccgtggctcctccatggagatgggcgctgccatcacggtgctggtcttctcgcagtactccctgcccgtttccacttctatgtgcatcactggcgctaccgtcggtgttggactatgcaacggaacttacaaggccgtcaactggcagcgtgtcttccttttgttgttcgcatggatcatgaccatccccatcgctggtacccttggcggatgcttgatgggattggtcctcaacgctccccatttccttgtttagacaattggctttttggtccaatcgtgaatattttcgagaacgcacatattttacttaattcttcttttgaaataccactttttagagcactcggacaagaagatttaccagaagagtcaaactatttttggaatagaaaagctttcaattgaaataaatgataatgacttctacctaacctcttcacttttcaccattaggataaaaatagaaatgagagcgagtggcttgcctctgagttttaattgaaaaaagacaaaaaatagtttccctgggaatcgaacccagaacctttccggaacatatgctagtcgcatttgttaacggaaaatcataaccgctagaccaggaaactgctcggccacttgggccaattgatgaatggacaggccattattggcctcatgagtctacaactttgttcccaattatttaggtccggagtaacagaacgaacttgtttcgccaaccttccaacattcgaaagtgggcaatactcaatccacagcggcgagactctcaatggttcttaatacaatggaagttacatccatctttggttttatgactgactcttcatttgatttatctcatctccgacaacttagggtttccaagggatattcttttgttagtttgatgttaattgtacgaattcttcaatatttcattaagaataactaatttattcaacaccatgatacctaaatcgaacgagaaaagaagaaaaaaacttgaacaacacagatacatatcttctcaaacgcagttgcatatcctggctccgtgatatgcgattctcaaacaatccccatctcttcagcgaccttggccaactcatgtctttctctgcacaagtactcgtaagtgacaatcttattgcgagcatcctcttcgatggatttccattcctcgggagaaatggtaatttcgccatgttgctttggaaaaatggtcattgggcggcagcgttttgctaggccgaccttgaaaaacccgagccggaactgggtctgctttgtcggttcgtgaggaactccaaatacaaatggttctttcggacgcttgtagggttctccgttgactactgacgtaaggcccatctggaaacattcttgtctgaaccggtcccgagccgatcccggcttgggcatttcgtacgcagctcgatcactgggaaccttggttgggactgcgggagctgtgcccgggatcgggagctctgatggctgggtttcagctggggcgtccggagagtctgctgcgtgttcatctgtgttgtcacccgtggtgtcatctgtgaagtctctagagcctctgccaagatcgtcgtcggattcatcctcggtgtcggtatcggtgtcatctccagaattggtgtcggtgtcatccgaagaatcgccccaagactcgtacccaagctcttctgcaaggaccattccgaggacctgatcttgggaagatttctcgttatccaacacttgctgcagaagctccttgtccaccttccagtgaatcggcatcttacaccagggcttcctgattttgccaagtggacgttgcctaaccaaaggtagctgtagtttgacgagagcccccttccaagttctcaacggtcgtttgcgtttgtcttcggtcgagacagagctgttcgcagtcttgtcgaatttcgcgtgtgccgctatagccttatcatgagcacgttgtctctcagcccgggtctgctcatcaattccatgcctggtgacatccaggaagaagctcaggtcctggcattcgacgccctccttcgggtccatggcacaagggttcgctttcacgaagtgctcatgagccttgcgcatgtttccgcgcagaaactcgacccgacccatccagaactcacacctggcaatgaggagggaattttcggatttgtttgcggattgcctggcgagcttgaccatcacctcggcctcagaggggtcttcatggatgatgaagttcgaagctggcaagagataagagccgacctcgacccgatagtacatatgtaacaaatcgttgttagtcagattgctggaattgctgttgattttttttgcaagaaccctgagcctgtttgtttcttctcgtatagcgcgggcttccagtgtgaggtcttgctctccccgagaatcgagtggtgtggtctgccgggagctcccatcatttctcgtgtggggtatgttgtgggacatggtcgaagtactatcttgccccaatagggtcctggattaatcttggtaaattgtgaagtaaatttgatgggattgccgtttgtcttgcgaagatccaaaaattcgcgtcagatagaagagatacgatagaagaaaatattggtagttcgttggtgaaggaaaatagcaaccgagaagagaagcagtggccttatgtacctcacaggcgtgttgaaaagaaagaaaacaaacgcgttgaaaatggtccgacctagacagttacaaacaaaggcatttgtttacaaggagactttggtgtcctttcctttgtttctatcaatcccattgttgatcgcgctggaaccaagacgccacattctatcatacccttcactttgtgtatattttggcttgatatgtacaagttaagtaataaataaatatcattttcatggctgtttatgtagcactaagtattctccaccctatactagaggtgctgtactggttcagtcaatatatacacactggatacaactatgacagttactttaatggggttggcaaataatatagataaatttaacctactacaatttactcgaaacggaaatacaaactgtggagttttggtttattggatttctttctcaagcaatattcatcagtttgaagacatcacaacgagatattcctataaggaatgatcattattttgtcacctattcaaggataatcaacccagattcgtctcgaagggccaatcccgaagttaaagaatgagtgacccctcaagtagcccacttttcaacccgattcacaatctatatctggacactggccgaactgcttattgcaagagtcatgtatcaatgaatgaactggaggaaataccaaagtagccacatcaggccaataaacagtgcttttgaagtcggctgtattttcaacgttgtttaccatcctcccaatctaataatgcgtgggtagacgctgccggtgagtgatcaaactcagcagcctctattcgagtaaacccaatgacagcctccctttgaatctcacgggccttttcgctatagcctggtattacttgtgcccgcgaaagcgacagataagcatccgggaatctatgaagtttcatgaggttcattcctttgataaaatgagtaatgcaggcgataattcgagattctgggttgttcaagacggcataacaattgttcatttgcacaaccatctctaggctcatcgtggattctttgaattggcaaagatggtgttggacagcagcaatgaaaagtcgacatcgcatctcatcaagttcgcataaaaaagggttatctctgatgacctgcgaggcaagctccattgcaagctctgggtcatcatgtcgccaccgctcttctgcatctaccagtaatgagccactgtaggagcagagccagatatcatccatagatgtacgcgttattcctgtgggcgaaattgttctaggaatgtcagacagagactgggaatcagattgaagaggaggaacagcgagagtggggttacttgaggtggtgtgtgccagcatgaaatcggactctatgagccgcaactgaagatcgtatactgcatcgaaggctcgacacaattcttgttctagttcggcaagttgggaacgtcgggaacgtcgggactggaagcgcttgcgcaaacgtcggaagatattagccattttggagtggaaacgtcttttgatgctctcaagctgatgaatactttgagataattctttcggggtttatatacttgtccatcgagcagtttccgggatggcttctagaggacaaccgcccatactgatgaaagagatcattgtttctttgagcgcaatcatattgtactacctgagtcagaaacattgtttggaacacgctttgtcccaactaaatatagactaacatctcgaagccgaaacggcgaaaccaatgatgtgactctgtgccaccatgtggttgagtttgtcgcctgatttctagggcaacaatgtgcaaaccaagcaaacattgcaaacggacaaacatagcaaacacaaacagagcaaacttgacaaatgcgacaaacatccacctatgacatcatctgcccgttgctccccaccttcgtactccatacctacagcacgtcgcctcgcaagatgcaaccacaaagtggaagagcaactgcgggccaatgagctattttgggtatttcccgtgctggccgcagtgcccaaccggtaggaaatacccaaatttgtttagcggcagagcgtgccagtcaaattagtagtattcttccgacgcggatgtaaatggcattcgtaggtgcgtgaattgtttgaccaatctgacctatctaattcaatctgtccaatcctatcctatagatatattaccgcaaaatccacttaccggatcagcccatggatctagacttgggtaggagttgtgttgcaaacacgttcagcaagacaaatccgggttggagactaatctgttccttgaattgatttataaagcctgcatagtgcccccctatagtttgtagttacttccttccttattttactactcttttgtaggccaaatcgtcatataacaacccgtggaccttacccgatctttccgttctctaataatttgtcatagagagttagtttgccaggtacgccgatttgatcccttgatttttttttaaaattttgatgcctgaactgacatccatgcagtcatgtctcctaccttgctcagaaacgtcgacacggttgaaattgtgaacatccaccaggatgacatggaattctcgctggtggatgagatctacaagagcctggacccaccaaaaggcaaaccgcgctcattccctacgcttctactctacgacaccaaaggattgaagctcttcgaggatatcacctatttggatgaatactatcttaccaacacggagattgaaatcctgacaaaacatgcgaagaggatagttgcacgcattccggagaatgcccagctggtggagctgggaagtgggtcggtgacaccccacatctccatccgtcgcctcgcgcggcttggtgatcttgatctttggcccaagttctgacgatcttctttttttagaaacctgcgcaaggtcgagattctacttcgagaatgcgaacgggttgaaaagaaagtggattactatgccttagacctctcattgggggagctgaagcgaacattctcagaaatttcgcccgagagcttcactcatgtaggattccatggtcttcatggaacctacgatgatggtctcgactggctgaaaatcccagagaaccgcaagcgcccgacggtagtcttgtcgattggctcatctatgggcaattttagtcctccgggtgctgcggaatttcttggtaatttttccaagcaattgaacccgtccgatttcatgcttattggattggatgcatgcaagaacccggagaaagtgtttaatgcctataacgatgccaaaggtgttacccgccaattctatgagaatggcctcctgcatgccaatagggttcttggcttccaggccttcaaggctggtgaatgggaggtcttgactacgtatgatccccgtggaggacggcatcaagccttttatgctccgaaagttgatgtggtcatcaatgggatcaagattgccaagggagagaagctggtatgcgaagaggcatggaagtacggtcgcaaggaacgggatgagctgtggcgcaaggcgaacctcatttccgaggtcgaatttggaaattcgacagaagattattgtgagccctcatgttctgctcgaattgtaattgcacatttgttgactttgaacagaccttcatctgttatcacctgctgcacttcatatctctatgaacccttccaagtatgcagctcagccgatcccgagtatcggaaattttcaatctctgtggattgcatgggatctcgcgaccagaaccatggtccctcgcgaggagcttctgtctaaaccgatcaaactccggaaagcactgatcttttatattgggcacattccgacattttttggtgtgtctccaatgttcaatgttgcttgccatgttcactgctaattatgctgaaacttagatactcacctgacgcgggctttgcaggagaaatctgttcagcccagtcattataagcggattttcgagcgtggtattgacccggatgtggaagatccaagccaatgccatgtccacagcgaaacacctgatgagtggccgccattggacgaaattctcgactaccaagagaaagtgcggactcgtgcacttacaatcctacaagagggatatgcgtcgcaagaccgcgctgttggagaggctctttggattggatatgagcacgaagcaatgcatctcgagactttcctctacatgctaattcagagcgataaaactcttcctcccacaggagtggatcgcccgaatttcgagcaaatcagtctccaggcaaagagaaacgaaacgccaaacaaatggttcaccattccacaacagactatcgaaattggattggatgactccgacgatgaagttgtaccaagtaaatcttttggatgggacaacgagaagcctcaaagaaaagccaccgtgcatgcctttgaagctcaggcgagacccatcaccaatggcgaatatgccaaatacatacaggataatggtattcaaacataccctgcatcttgggtatttaaccagggccaagacaatcccatttccaagggtgtcggttcctcaggcgcccaggccgggtcgagctccagtcctgcaggattctctctggaggacgtcacggttcgaaccgtcttcggacctgtggctctaaaatttgcacaagactggcccttggttgcttcctatgatgaagtggccagctatgcaaagtacatgaaatgcaggatccccacgtttgaagagaccaggagcatatatcactacgcagaccaactcaaggctgatagagttacaaatggccacgggtatgaaaacaatcatagctatgatatagcaggaactaacttataaaataggaatggggtaaacgggcttgataatggtagcaagccccactctactgatcagactattttccgtgatctcaccggttgcaatgttggctttcaaaactggcaccctgttcctgtcacaccgaatggcgatcggttagctggtcagagtgaaatgggaggtgtttgggaatggactagcacgcccttgaagccgcacgacggcttcaaatctatggatatttaccctggatacacaggtaagtgatacttgagcatccccaccgaacccaagcttatttgcctcgatagcggacttctttgatggaaaacacaatatcgttctcgggggctcctgggcaactctgcctcgcattgctggccggactactttgtgagtataaaccctatgagattcaaaatggatcaactaacacattttagtgtcaactggtatcagcataactaccgttatacatgggcgggtgcacgtctagttagagatctatagatagagcttgaacaatgccattgagccctccagtgctcaatgaggatgacctcattctcgcgataagagataaacagtggggagcgtaacgtgactgcccctccttccccaacatcatctccaattccatgtcttctcttcattctagttgaattgtaaataccttacatgatgtcgctcgaaactattacaactatctccccggccaccaatgagcctgtcatcactcgtaccggtgtctcatcggaggacttgaaacagatccccgtggccgctcaagcagctttccggtcattctcacaatccacaactttggaacaaaggcagaaaattgtggaacgtgctcttgacatcttggagaaaaagcaggatgaattggcacgtgaggtcactgagcagatgggccggcctatcgcctatactggtggtgaaattgcgaccgccatcaagcgcagtcgttacttgacccgcattagcacatccgtactaggcgagcaaggagttgtgcctggggaggaggagaagggattcagacggtatattaagcgttcacctgtcggcgtggtgctgattatcttcccctggaacgtgagttcaagtcgtcgagatattgatatacctacagactgctgataagtacatagtacccctacctcacccttgtcaacagcttgattccagccattctcgctggaaacgctgttgtcctcaagccttctccccagactccaacaattgccgagcaatttgcctctgcttttgcggtggccggtcttcctgaaaatgtgcttcaattcttccactgcggatctttcacatttatcgagaccttggtgcgatccccactggtgaaccatatctgtttcacgggttctgaagctggtggcctgttagtgcaaaaggcagcctccgatcggattgtgaatgttggtctagaacttggcggcaaggacccggcctacgtgcgggacgatgtagatcttgcctgggccgctgaggaaatcgtggatggtgctatcttcaatagtggacagagctgttgcgcgatcgagcgtgtttatgtccacgagaagatctatgatggtttcattgctgaggtgaagaaggtcctgagcaactaccgtgttggcgagccttctgatcccaagacccaaattggtcctgttgtctctaagcgtgcgaaggaggccgttctcgcgcaaatcgaggacgccgtgcagaagggggcgaagaacgagactcctgccaatgagacctttgagaacttccctccgaatggaaattatgtcaagcccacgttgctgaccggcgttaatcatgatatggccgtgatgaaggatgaaacctttgggcctgtgattcctgtaatgaaggtctcggatgacgacgaggccattcgtctgatgaatgatagcgacttcggtcttaccgccagtgtttggagcaaggatgttgcggcggccgagaagctggttgagcatgttgaagctggcactgtctttgtcaaccgatctgactaccctagtcccgtaagtgcaactcttagcatatatattattgtcccccctttgctaaccaaagtaccctacaggatctcgcttggacaggctggaagaactctggtcgcggtgtcaccctcagtcgattcggatttgagcagtttgtcaaactgaagagccaccacatcaaggattaccctaaataaacatgtgcatgtgagataattacattttggtcaggcgtataaatttcaccacgtagaccacgactcagaatcaagagtactattctcaacgaatcgacaatttcttttctccagccatgcccaggtgcggattagaggagtatgaaaaaaaaagaaacagacttatcttttgcgaccgcaagagcctcaacaacctcgctttttgcagtgagatcccaggctcactatctatatactggcaagcgtgctcttcaatggtactacatcttgctcatagaatattttgaagggtttcatgacccacttgagtaaattgttggaaagccggcttgtaattgttcaccaaattcttagaacatcgagattttacttctaccttattttctcgtctctaatatgagactaaagctacgctctgcctgtccatgtaacgggcttttgtcggctatttgagtttgtttcaggcaggtgctaaaaatacaactgccaactgtcaactgccgaggttgtagttgactcacctctcacccggcggcgtattgcgaggatcaacaaaagctcgatcaactctctaggccctcgtcatgatgtcaatcccattgtcggaggaaaacccctttcaatccttgattgccgaggcaaacgacgattcggtgggtggatgcgagaattatgaaactatcagatgtttaaccctttttgatctaataataggcaataatacaatctcgatacgagaaccaccgagtggctcgcaatagccagcaaagtgcacaaattctagccgacggctttccaggctggtcccttgacgagattttgaagcgacttgatggccctgagaaggaagacggatttgctgatcctcgaaactgtcttgtcatttgggccagaccatcgcctcaagtctgcgacatgatacgctttattcagaatgagttgaagagcatttctccttgtaagttcaccaatatagaattccctggcgcgggatttcctttttagcccttcatttcgctaacatgagtggtcatagcactctggttgatgccaccttcaaaccttcacataactgtcttggaagccgctcattccctgacggaagaacaaatcgaagaacttgttcagacactcctgtcatccaaggatgtcacgcctgcggatattgcggcatatccacgcagccaccccacgcgtctcatcaagcctatgataagctttgattctgccgcactagcgctcagctttgttccggctgctagtgagtgcctagaaacagaacctagtagcgataacgagcactacacataccatcatcttcgccgtgatgtatttgacatggtccgacaagccaaggtccctgttgcttcgcgttatatcgttccctccgcacatctcaccatcgcaaggttcatctcccaggatgggtttctagtcaggggatcagatggcgcagagacggtggaccattcgcgagtcaagctgttgattgataaaattgatgagattaaccagaggttgaaaaatgagtattggcccaaggagggtgcggatgcggtcagggacgggggtgaatggattgttgggcaagagggtctagtcattcggagaggccgtctttggtatggagggggtgaggatgtgccacttgactagatctttgcgttggaagattgagctctgcctattctcctagactagaagggttttgcatgttgactatgcgtaccgaattccttaactagaccttcctctacgagtcgtgctaccgtttgccaacttacgtgtcgagcataatcatgaactatcgcttggtgtatggacgatgaaaagatccacataagatatatttagcaggcgggtgagcgccattgcagagtcgtatgtcgcaactatcagtttctgtgcttgaaagcctgagctcaacccacgcgatgtcacgtgctagtacaattcctcaaaatggcgcaaaagaagcaatgcaaatgtattttaatgatagattactatatcagatggtagatattcaatcataaattccaataacatctactgaaatcaaataagtcgaccttggtgagcgtcaaatagcatttaagcttggtcccactctgctttgccctataaagcacattggttcaaaaattacaacgcggccggctggcccaatggcaaggcgcttgactacgaatcaagagattgcaggttcgatccctgcgtcggtcatctctttttgtttcttatttttttgctgtttgagatttaagagtttctgctacaataattgttatagtggttaatatttcaatccacgagtttgggaaactggaagataccagttgaattgcagagtctaagtagattgataactctgctttaggcaagcccgagaatacagtagactgggtgatttggtccaatgtgatcatttctagttcaggtgatcgaacaatgagcgatgcatttgttagatctatgagcgcacccccgaacctgtttattataagaaaaaaaatatatcagaagataaaagcaacataccgggaatcatttgacaagaatttcaaactcggatctgtaatattggcttttgggttggaaagtagccattctggtattgcgtgcggatcgaagaaggcaaggatattcagcagtattttcccttcgatggacagggatcgagaggaagccttgcaactcgttgacccatcttcatattgcgaagacatagtttatatggcgaatatattctcagtaggtttttttatagacaagcaaaccacataggaatagctacggtcatttgggaataggcaaaaccgtctcaactggccggcaaaatgcggagttaatcttggtatctcggtatgtatctctggccctaatccttgtcgacttctcgcgttcgtataatggaggaaaacaggagatggattcctatggacaccggatcatgttctgctcatcacacaaattatgaatcgtccctcactgcatgaagctcagcattgtggaaggttaagcgcccgccaaggccaattaagtgagcgttttatgtcgacctacatgatacgttgcccaagtcatatatataatgaacaccgaaaaccttccaaccatagtcgattgcattacttccatttccaatcagacaaacctaataaaatccgacctacgacgtttcctccgttaaacacgagacaataagcttccaaatcagatcgccaagccacgtacactcaattaagaaaggctcggtccgtcatagcacgctatttcatatcaaccaataagctttcttcttatttgctccacatagtatacgcgcccacaatgtactgaaagctgaaagctgaaacagtcatgaaggggttaatgcggctgggtaattttagtggcggagatgaaagcgataggacaaatgcgatcctggtcaatattaatcctatactatccggcagcagtcaagcaacggattagcgttttcatttcctataataacgccatactatggtttccaacaaagccagttagtagcacagcagcctattcatctacaaagaatgtttattaagtgacttacaggaaaccaacgagcccataagatttctatctctagagcgtttttggtttttgctaaggactcccacaatgacctacgaaaaatacaacctcgggtcaaactacgaaggacacataccacgcatattagcatcgatatgagctggtacgacccatggctatttcaacagctgcagaatttacctcacagccttgtgcaactccgagttggaacatgcaaaattcaagacaagcagagcctaaaaactctttttgagggcattgaagaatactgcgcacgggaaactgaggcggtctctattgatgaaatcactgcatacttacgagaaactggagtcttcgatcacacaaaggcgctgcacggccatcaaacgcttcttgtctttgccgctcttggttggcgttctatgttgtaccaagctgctttcaacgtctgctcaatgcaagaattagctatccatgaagactccgaccagccacagtcaggtcttgtttttgatatgtataaaatcccggctgaactgtccgaccgcccgatttctgttctactcaaagcttttgggcaccttttaccagcgcgatcctcgaattctcgctatcttgcaagcgaggttggtgggatagcatctatttggcagcccttgaatcccgaagagaccaatgcatatctacttcatgttttgcttcgtgttcaaattcgatgggtcgatactctatcactgcaccttgactatgacaaaagcactaagaccttatgcctcttcagatatccgtcattttgtcttgaaatgcttcgatcccacgggttgatctactctttttctagcaatgaaagcttctcaggggatcctcgttcaaacgaagaagaaatttcgctatttctgcaagaggtgcttttatcctatcgtcttctttttgcccagtcggccccatcgaggaaactctttcgccaaatatatacgatgtcggatttgcagagctacccgacagattccttactttttcagttgtgcacccagaagcggattgcgttgacaatgctcccaacagacaagccaatctatttcgctgcccgagactttcccgtgctgtatgacaggatcgagctcatggctaatgatctcaaggatgcaagaccaagctcaatcttcagtctgatgaaagacagacgtgatactttgacgtactggacattttggcttgtggctatgttcggcggcattagcattcttttgactttggttcaagttatcttacagggcgtgtcaatgatgtaggccctattgaatgaataatcaagcatcgagctatttcaagggtatctagtatgaaagtgaattcatacttcgcaagtcgtcacatggccattaaatcgggcagaccttgtgttgtttgaaggggttgtctttccttcatccatctcagtcaactgttcatttcctttcgtgtcttctggagaatccgaccctcggcaaccaagtacttcggtcatgtgatcgaaattatactaccccgctcctaacaatgtccttactctgaccctcctccattattctatcatacagaaggaatatccaacatgtcgattacccatatcgttcttttccagttcaagccggaagtagccgctgaggttgtccacgatgtacgttttttaccaaaattatcacagatgaacttgactgtgtactataaacccttaatggatgttgacaagtacctcaaaaggcctgtgagcgtatgctaggtctcaaggatagttgcgttcatcccacctcccagaagccctatatcaaatcggcgtctggcgggaaggataactcttccgaaggtatccaagtaagttccctgggatcccagaggacgaactctgaggatatcttactaatgcatgatagaatggcattacacacgcatttgtcgtagagtttgcgagtgctgcagatagagactattatgtacaaagcgatccctctcatctggccttcgttaaaactcttggtgggatcatcgagaaagcacaagtcattgacttcactaatggagttctctgaggttctcagtgactgcttcaagtgtccacatatctgattttatgggacatatagatactgtgaaagaatagaccgcatgttatattcgttcgcaatcatatatacgctaccaattatttcatgcagcagcctagggacttctagtacagattatatatcagcagctaaagctttctaacttggctatatgccttgcactaatccaaaacttggtatttgggcagacctatattttaagattattaacatactcatgaccgctcacccatagcacagacaaatccagagcatttgtgggttgatccgcagagtgcaaatatttctgtgtacaaacgtccaacaagaatggatcctcagcgcaaggaataatatctcccggcaaaatagtaaggctcttctagatctagagtttaatgaccaggaatgtaagccaagctcgaggttcgcgaagcactctgtcggagctagccgatgcgccaataatatcttgttctcagataggcaccgggttttctagctgaaaactctagatctagaagagccttgcattgcgaggactgtaagcataccaaatccgagcttagtacccatgggtttaacgtttaccagaattgtagttatacgttggatacctgaagacaataagattcaatagatgtttagattgagttctcgtaaatatatcatcgagcgtatttcaaaacttcaagaattcctcatccctgcggtttcggtaagttagggctctactctgttttctcggtgaaacaacctacaacaattatacctgacatagagaaattagagtaaaagatagcttgggtcagttcttctgctgtcttccatcttacaattgatgatatgaatgagcactgcgtgaaacctttgtgagctgttctttgactcggcattgctccgaagcaagggagaagcgagataaaaaaacgcgccaaccattcccgagcctcgcagccacccgcaaggtcttttatttcgattgaatagcggaacgggaaacgggaaaccgaatggagaaatttgccttgtttcggaatggccaatgtggctggaacattggggtgatgttctcattgtgaaaggtcttaaaattgccttcattgtctttgagcctgtgtatacacttgacctccaagaggactaccgaataaaccgcggtagatatgaacacatagttatctaacgcgaacaatggctcaacccgcaggatcacccctgtcagtgataaattcgtaatcgatcgacacggctacgaagctaatgatcgacgatgcatcctaaaattggttgccgagaaccgggtcttatgaacgcccgatttccgagacaaagacaaagaaaacgaggcaaagaaacattttaattgagctggtgagcttgcatggaaaagaagaaaaacctattatccccagacctaggaacaaggaatcccgagcttccaagaccctcacagggttcattcatgcacatatccgactcggcaaacggagatttcagggatcggcggctagttagtattattgaaatgtcgtgtacagaaaaaaaaaaaaaaaccaaaaagaaccgaatagacaaaactttaaagaaagataagtctctaatccaaaagtggaaaaggagacacgaagaatgagagggatatgtttcgccagcacacgaggttttctctgcttcttctcccttttacccctttggtctgggctgctttgcacttgatccactgaggggcgaatacctaatctgcatgggtctctaacgccagcatatcttccctgcaggctgcaggtcatggctgccgcttgtaatgcccatctatattgcgtccgatgagttgcagcagatcgtgggtgagagatagatacccgtagaagcgagatcgcctcgggggatagacacttgaactctcaagagccggaataggtcaaagggacttcaagcattcggaactctctgcgcaaagccaatccgatgcaagacaggctccccagggaggacccactgccgccgccagggagcgaactgccagattggagtcctgccgagcctgtcattctctccatgccagacggtggtcgcctagttcaaccggggtgagactgtggatcggttcgtccttgacacgccgagaatagcatagatgtgcataactccatactaatatatgtgctctcgcccgccggttctttgactctctttcattctctaagcacacctcaatggtgtaaagcggttgcaacctttttcttttttattctaattttctttgggtgttgtcatccctagtctctcgtttcgctttgtcactcgttgtatagtatttgttgcacctccaagcgtcgcctttattcctttcattgccttattcgcatccaaggacatcctagctggaatcgccattgttgcaagtccccgcgaatcgcctagcactttataagagctccttatccgccgaccggatcaaatcgaaacaccatcaatccaacatggaatgctttcgccaaattttccggtgcctaaaggcacctttcaaacgcgacaagggaagaattattgaaattgtaagtcgagtcgaagaccggggaatcgttcgtcattgcaaagacggtcgctaacaagtttatgaaacagggtcctcccactaatttccgaaaagaagaattgcctgcttatttttctgatgccgagtcagttctctcgcccagccaagatccagcggaacgatcaaatctgaccaatcaatcacaggacgcttacgtccgaggacagccgcatagcgaccgtggagaaggacgaaacaacgatcgagatgctatcgctaccatcgtcgacgaagagcaagatgcgggcccatgttcgaagaatgagcgtgagactatccgagagcgcgtgaagttatcccgatggtggaaatcaagcccagcttcagatcataaaactaaggccccggctgaatcgatcaagatggaggaaatgcgaaacgccgatttggcgtgttcatagggaaattgtgcattggtatatggatggtcacaccaagaaggtgggcacttcggtgtgccgggatctttttgcatctaaattgttccctccgcctgttacaggcgattgtcttgcaggagattccttggacttgtcagatatagagtaatttatccgagatgactctggtagttcatcgaggtcatcgaaaagcgattgaacccgtgatttatacgcgttcgctggactgggtcgcccatgtgtcggcttcgctttcggttttgacgtagacatgcttggtatttcaaattgttgccgggctcgtagtgttgtctgatcgtgagcctgagcttttcgtaaagtggaatttgttcccttgggcggtggtagcactggccggggttctaggtcaagatcgtcatcgtcattgtcatccgagcccgaggccgtctcttcatccagttcaatgcttataacttctgatactcttgacggtgcagtgaaacttccgatactgttcacccgggctcgtccagtagccaaagtcggtgcttgtccaaagcccgcagcagctctagtagaggactttggcgcgtgagctcccgctaaagaccgggtttttcgtgggctcgtcataaggtcgtggagatgtgttccagcccatctctcatcatcatcatcttcttcatctttctcctcgacttctccatcccctatatgtgcgagtccagctttttgtcgctccctcagcgcttcagcttctctttttcgctcaacctcatttggtagtgaggtacgcccgtctgtaggcctctcaatttctcttatcccggctgcgtgttcggctttcacctgctttcgccgtcgcaggtactcggcgtgatgtagatgttgagtaaatgtttgcgcgacggcgtagaactcgtcctcgaccatgacccagccgtcatcgtgttcaataccctcaatcaaaaatctataacgtgcttgttagcgacttcgtctggttgtgcgtggtctggttgcgatcatactcttcggatggacaacgtctgatgggagaggtcggcgggctttgggctgtacaaagtaatcagtctttatgtttcgtctcaaatattcgaagattagaagagacctacatgatctgaagaaatcacgcctggggggagaaactcgagggtttttgggagtgaggtcgcgatcagcaagttccgtcttcacgcgcttccgcggtgttgacttttttttcacaggggtggtattctcagcgcgaagccagggcaatgtcctgggcataattaagataatatagaccgaaattaacaggtcgcttggtgtcgtgattttaggggaagattacagtggagggaaagagagctgataggcatccgtagccgataaggtgaggtcacccgcattccgcgcaaaatagatcttcgattttggagcttcactacggactggagaatttgcaagtataagcctcgttatttggggtatctaatgtcatttggacattggtaatgcaagatgaaaagaactgggatggcctcaaacgccccgtgcaggatatatcaccgaaatcaagaacgaactgccggtagaacgccattcaagggaaacaaaaaaagaaaggaaacgccagcatctctgcaagcaaaagtccgattacacctcaccaggccgcttgctattgcagctcacgatcttcaccttgtccgcggatacagttgtctggttgtctagcttgaacgagacatccttgatcaagaaggtccagacttcgtcgcagaatcggtaggtgtcgaggtggccctaaaagaagtagaaaaatgtatacatcagcctcattgaactatgatcaagcaatgctcatctgggcaagggtgttctctgaaccggaatgagttaccttgaaggtcagtctggcccgaactttgtccgccaagacttcagtgacaatcttgtcaaaggtcccaaggatcttcatcgccagctggggctcgatacggccctcattgatcaggtcgtcgagggtatcggtgagggataacccgaggctgaatgttccttgggtcagttctgaaactttccgtttgtttcatagggtatattacctgctgccacggtaaagctcatagtaagctactgatgccattctgagataaaataatggcagactagtcgagagagtatcgggggagtgattgacaggagcaagttcatgatcgccggccgaatcgcggggggcggtcgccagcacgtgatctcaatatggtcacgtgtatattcttatctcaaattgcgtcagagtcagatgaattgaatgtgttggaacttatttttgacatcacaaaactctcagtaaacagacgacaaattcttaaaactactgcattatgattgtgaaggggttagggcctcgatctcctctcaatagaagattgttcagtcaattgcaagttcattgtgtacgatccttatcgacaagcttgttcagaccatcggaagctcaaggtcagtcagttccgttcaaatgcccaagtcagagctaactgcaatgctcctgaattttagaccctcaaggctaccaaattactaaatccaagcaagagaaaaccaatcagacaccagacgactcctcgaacaaagacaacaagtcacctaagcccaaaactgtctccgaagccgacgccgagcttcgtgagcggctggaacatatgtctggagaaggtggggcctctggaattgaatacgaagacggtaaaccgaatgcaatgaagcgcggcgtgcgaaacaacatgtttcgaataatctgaagcaatcttcgacatcaacatatctcaagacaacaaaccttgaccatctcaaatgttacaatatatatcaagtgaagtctcatgttctggaatctagacttggccccctgtgggaaagaaatgttctcaccgtttccttccggcctcgggggttaaagacgtctaccaggaccagacttgaatttgcttctgaaaacatagatgaggatttccagccttggctgcggttggctttgcctaattagtccgaatatgtgcatgtggatcttctttgatacagatacaaggtcatgcataatcaaatgcattccgctcttcaggtgttcgtgcattctccgatgacgattccttaggtggagccacgcaatcagtcacaatgttctcgctgtgaacttctcgactttcaatagttggaatattcctgcacatgtgccattggaaagctttgatttcgttaggagatgacttcattgcaatgtgcagggtcttgggccagagcaagtgcggtgaattgcatgcacgtcctgccagtgctcggggtagtgccccataggctgggcttcaacaccgctctgatcggcggtgaagtcttccttgtagaattggattttgacaagaaaaatgagagaccataaacatagcgagccaatataatggagccgaaaatggactagtccaagtacaattaaagaataaatcaatggaatcaggaccgtccaaaataggatcacaatggcagaaatcagatatcatttctatgcagtgagccccaacttgaattcaaagaaacagacattatcctaccaacacctaatttcgaaccattttcgcattgccgaattccacccaaaggaaaaaaaaacaaaaacagaccaatgcttgctaacatttcagagaaaagctcatttccgcacaaccatgccagccaaaacaccagcgccaatgacaccaccgtcggatgcttcccgtaaaaataccgacttcccacctcgttgcgggccagttcgcatgataagacggtcaatgtattgctggcacatctccttgaattgcgggtaatgttggataatgccaccagtgtaagccacgacgagctcttcaggaccggactgccaatctatcggcgtaggatcgaggacaggcacgacatgttcctgggctgcgtggctcgcagcaacagcggcagagttgaggcttgcagccgcagcgtccggtgcactaagggactcagtgatggtgtcgccgtggatctgaggtgaagcgggattctcgggtgagctgctgttgctatcttctttcagctcgatctcgcgagcacaggctagtagtccgaccactgcagcggcgatcagcccggctgatcgtctctgtacggtgcgagcgatctttcggaatgcgcctgcggctcgggcatcccagcgccagtcgctgcactctggtggggggagggatttgttcaaggctttggcgagatcgttgtcagatcgggctttagcaacaacgtcggagatatatgtggttgtcagggcgtattcttggatgaggtttgcaggtagggagcgtttcgataatttggctactgttgtgagatagtcgaaaatgatcaagcgaattagttcaccaatatagcggcctccagtcatgtattcaaagggctgaaagcctggccgcgaacaggcctggtctagctcaatgtcccatttcgtggtcacattgagctccttgagtggtggcgcagcacctgaaatagtccactcggtgttgacaacagtctccacagcgctaggctccattatgttcacgctcttggctttcgattcgtgcaatgcactaagcttcattgggatggttgcgttacagccagtacccacaatgatacccatggcgactctgctgtttggtagagatttgaccttgtatgcaagggaagctagtgtggccaccgtgtcattggtgatagcttggattttcagttttggtaatgcaaaaagctttcgacgtttggttgaaggttcatcttcatcatcgggtcgccttgtgtgtttttcatatccatctagaagtatattgccaagattgaggtttgacgagatagcgaagcctttccccatgggcattaatgtggcttctgctaatgattcttgcctgggcttagttagtacaaaatccactacaacgcgaagggaaccacacagcccgacacccataatacaagcacaggcggaaaaactcacatgatggggaaactgaatgtgattcccatgtccaattcggcggggatgtcctttttagtagcatctgatgatagactctccgctaccacctccgcaatgcaatccccgatccaagaaaagagatcctcagccttatccatcttcaaatgttcttgaataggccaagctcgttccagcgttcgtttcacccgctggcgctgagctttccggatagtgtcgcgtgacctctccgtggcatctgtaggccgaacatcggaatcgacggcttctccgagtaattcgataaaagcgactcgaaggttgctacctcctacatcgatcgccagatagcgaccggtttcccggccagtaggaagttgagtcacgggtgttggcaaaaattgctggtccgatgtcagggcaaggttgcggtatgtggtggaaaagcgccgggccagtttatacagcacagcctcatccaggaacagcggtgacaaaaattcttccaattgttgatggtgcgccagacattcttgttcaacggcgtttagttccgaactagcctcctcatcatcttcaatcagatcgtcgtgcatgatttcgtgctcctcatcctcatccttcttggacgattttgagttaaccgaggccatgatgaaggatagtagatataccccaactttttttttagaaaaaaaccccttatgtcaggttgaaaattccagacaaaatgagccgagacagctatgtcaatagtgacgtgtagggtctggaatgtttaggaatagagacagggcagcatatccttaaaatccttaaaatccttgaattgtggagacaagctaccggcgctaatccaatgccccaagagctagtcttgttgtgttagcgaggttgcaacaaagggaagataacatttcggtgacgcggtctgcaggtcgtccgggctgcgggggaaaaagagaaaacacgacgatcatgccagaattggaaaccccatatatggtttattccgtacataccctggaatttggtatgcacagattgcgcagataatgaaaacaatatttctgggggattcggggagatgggatgacacagactatatacgggggggaatcttttgggccaagaaaatacccctagatggccctgagggattgggtgaagaatggaagtgtaaagctccctgcttaagacgggacagagggaaaacaaaagaggaaacagaaagagacaaaataatatatgggatttgttcaacggtacctttatgttttggtcagactaagtattggagtcatcggaagaatagtcggagaatagtcggaagaagtgggggggaaatgatccctatcagatgctatgtatatatgatcagatagaagaaagattagacagtttattagaggttataaggaagaatatataagagatgggatgcgaccatcggaagacactaggcaatgcgacgctgttcgggacaagttgaggatcgccttgactttctattggattgggaaaactctacttggctttaatatcccctctttggcgtctttataaaatcaacgttgcgaattctatgtaaccctacattaagccattatatccggctaaacccccttccctagctttaagtagagattatcccggagagccaagccaacttctctatcttggcagtctcaggattagacaaaacacacgagcctgcgtattaaagcagaagttccaatctgttaccgactaatatgcctctatgagggatattggtggggttgaaggattccggcttggaaaaacgcgccaaagtatcgccaatgttgctattcgttcaatacgagggacgcctaagtgggatatcctacttgtggcactcgcgtgatcggtccggacatgcccatattcagacgcaggcacatctcacgaccttttgatctgacgggaattaagccgttcgcacggtctcgatcgttcgctggcatccgccacatcaggctgtcagatcttactagaggcggttcaaactacggggtaccttaccttggggttgcctgcccataattggtcatctacctgtcggcaaatagtccgattgttctcgtgtttggcataattctatcgatagaattgtttacttcgtaatgaaggtttcatgtacgagcctcaaagcacgcgatctcaagccattatgtacagtctgtccgtagaccatacccgacaaagcctagtaattctagacctggggctattcgaaacccaagctatagagtagtcgatgccccatctaagttgtctccgaagtcggagcccagcctaatctgatgaatgtgtacggagtacacggatatgggtagaccgtactccgtatagcctcggtgattaacggagcaaactacaacatacacttaaaagtggacaggatcctaccaatagtaataaatatgtaataatcacagggctgcatccttattagttaacgataatcggtcgggctcctccgtagcttagggtagttggggaataccttatgtaatggccttggcagcccaaggttcacctgggactctccacatgatcttatcaaaacaacgtcactcctgattttaccccatcatggagaaactaccgatccactctaaggagggatatggtgaccctcttgaattagcaaacaaccctgatcgtcgtgtgcgttctagcacaacaacctatttgtatcggattggtgtcgtcgcgttgctcttcgtcggctaccttgtgcttctacggccgtctcacccatgtaccggcatagctccacaaacggagagctatcaagctgaggttcaacaagagtatgacgactacttaaagctgggacattctgctcctgatgcacatcaaacacttgaagaaaataagatcccgctggaggctcacatcatgagcaaatgcccggatgctcaggcctgcttgcaaaaactggttctaccggctatggaaaaaataagtgacaaagtggacttcaagctatcatttattgctaggtgagcatcaaagtaaatgtgcagaataaccgatgttattgcaccagagtccatccgaaacatttgactgatactataataatagtgtgtctaaagattccgaagagatagcgtgcaagcatggcccaggtgaatgcatcggtgacatgctcatgctctgtgcggccaacctacctttccctcctaccgcagacgaagcatctcttccatctcagtatccccggacccctatcatccggtcactaggattcgcaaattgtctgatcaatgactttgcccggatcccagaccgcgagtttgttcaccaatgtgcaatggagcatgggattgactttgacgccttgaacaagtgtgcgagccaggagaatgatgatccgaacgatggcaacgacggcggaccaccacttagtggaattgcgctgctgcgtgaaagcgctcttcagggcgaacaactcggcgttaagatcagttgcacagtgcgtctagatgatgctgtttggtgcatccgcgataatgatgaatggaaaaactgtgtccataatggagcaggtagccagccctcagccctgatcgatcaagtcgaaaagctgtggaaggagagaaactgagttctacatggatgctttatcgttcataccccgcattcatacccatacgataggacatgacactcgataaatgccattgatgatcccctactatcatattgcaccaccgtaggcattccctacatttcgagtaggcgcttaagccatgccttcccatatgaactgccctatttggtgaccctaactccatgtgtgtcatgagttgaagatggtgttttcctcgcttaatttaaacaaacaatgcccattagccgagtcacgcacagttttcctcgccattgttgcatttaatcaggtcagagaccttttcccttcaccttcctctttctctccccaccacaagccaccatcagcacagtgcggcaatcgtcctcgaaccgcgtggagcttcgcaatgtcaccagtttctcatccaaaacagcgtggtaagttgtttcagccttgatcgactctattaccatcatctcgtcatgctaacaatttgggatgatagaggccaaatctgtcatgtcgcgcggggtgtgtgataaggaagagaccttgtaccttaagtggagtctggtgctgagcccaagcgagcttctaaaagagcttgttggcgacagcgagcatgctcgagccctctttcatggaatgaggcgccaggtccggtccatccgccgccgctcgcagtcctatgatgatggacaggtcacaatctacgaccgtgttctccttcgtctctatgacgagggacacactatgaaacactacggcctgcttggattttacctgaccgagcatctggggactaagaactgcaaatcggaggaggagaaaaacactctagttgctgcccacttagctgcccagcgcatcctggacaatggtttgtcgctgcgtgttgagcaatttacttttcatgcattctaacataacctaccaggccctatttccgaaatccctgtcattgcagccgataacgtggaaggaatcaccaaggacgccaggaccagcaagtcgccacagagctctggcacatccaactcacaccatatcgacaagctcatccaggtgtaccagaaggccaaggctgactactacatccttgaagtcaccgagagccaccgcgagcgaaccaacagcgttcgattcctccgtgacacggccgaaaacctcctgcgatacctgaagtcagtcaaccaaggccacgatctgatccccgagatcgagggtatcattcgggtcagccaagctcatgcaaacgaacttgccggcggccgcaagcgcaagtttgagcacgtagacaacgactccaggggcagcccaagcctcagcccctaccgaccctacggattccacagagaccagcgcagaggacacaaacgtcgtgaccgatatgtccctgacagtgtcacatgggaatacagccatgttgaccggcgagctggacgagatagccgtgcccttgactcctaccgtccttcttaagctcactgttctgagctgaccgaacgatacgttctgaattatggggtaaccattttcttcgctaccgcttagggaaagtacaaacctgcatgtactagaaaaatcagtcccaaattgaatcaacaacccaatttcacaagcaagcgtcctcctccttgtagaatagttgacctcgggacagtcgaagtatgaaatcctaagctatgcgctaagccattctcatcttagcgttgtttacaagcccacgtgcacagatgacataatccctcccagaaggggcctggggatcccgatgatcaacactggtcacccggtctcgcgaattgaggggaaacctgttgtattccttcatttcggttcagggaaggggtaatctctgacccaatggagactacctcactgatcaggctcttagaacgaccccaaaaagtctctcccctgagaaatggcagaccttcatccctccgccgcggggaataatgcatcttccactagctccagcacatcctcaaacccacgattcactccagtttcttatacctcagacgaagaaaacccagtgccagggactgcagaatcacccgtaggctcattgcgactgcagaccaacttcgatgaccaccaagacgttggcgaccctctatccgatttcgagaacgacggcaactataacacaagtgaggaacgagagggcaagattccacgcggcggcttgggtccgagatatacaccggaggaggagagcgaggtagtgaggagatttgaccgaaggctcgtcccgtttctggcacttctctacttgctctccttcttggaccgctccagtatgtttggttattccgcacagcgcagtgctctccctattgttacaagcatgtactgatcgggtatgcagacattggaaatgcaaagatagcaggactccaagacgatctacaactttcatcttcgcaatatgaatggctacttactgctttttacattacctacattctcttcgaatggatgacgctgatgtaccgtgttgttcccccgcatatttatatatccctatgtgtatgtggatggggactagtcgcatcatttcagtgtctagctacttcctttgggggcctggtcgttctccgggcattgcttggaatcaccgaggcggcttttggccccggtgttccgttttacctgtctttgttctatcgcagacatgagctggctttccgcaatggattgtttatctcagcggcaccgctcgcaacatcttttgcgagtagtttggcctacttgattgtcaggttcagcagtgacggcccgatctcaccgtggcgaactctcttcctcgtggaggggttcccgagtgtaattgttgcggtatttgcttggtttctgattccggactctcctggtcgggctcgattcctgagtcgccgacaaagggtggtagctcagcagcgtctcgaagagagcaaaaccgactataagcaatcgtatgggagtcaatttaactggcgagaaatcctgaaaactgcagcggaccccaaggcttatattgctgccgtgagtctttatctatatttgagattgtacaaagggttttaacacatttactacagtttatgtttttcagttgcaacgttgctttcagctcaatgcctgtctttttgcctactatcatcaaagagtatgcccgtcgccagcatctattcacaatctcaacagccagcttacatctcttatagtatgggatactcctccttacaagcccaagccctctcagcacctccctatctcgttgcctttgttgtagtcctcctcactgcatacgcctcagatcgcagccgctcccgaagcccatacctaatagcgcacgctcttatctcctcactcgcttacttagcgatcgcagcaactggttatttccactccgggctgtcaccatggcttcacacattcatccgctacatctgcgtctaccccccccccgcgggggggtttttccccatcaccctcctcattttaatgnnnnnnnnnnnnnnnnnnnnnnnnnnnnnnnnnnnnnnnccccccacctccggcttctccccccccgcggcggggttcttttccgcaatcaccatcatcattacatgggcaatggataaccgtgtcgaaaaggaaggcaagggcgcaagcattgccattctcaatatcatcggacaatgtggacccctgctcgggacgagactgtatcccgagactgacgggccgtggtatattcggggcatggctacatgttcgtttttcatgtttgttgttgctatattggcggtggtactgcgggttcttctacagaggatgaatcgggcggttgcggaaacgacctataatattgcacaggctggccctgttgatcagggtgaggagcgggatgtgctcatgggaggtgggaggagggatgatttggagaattccactggggatagaaggcttgtatatatcatatagtcgatacaataatgaccacttgaggtttctctgctttggtgaggtgatctctgtagaatgttcttattagactgccggtctagaatccctttggggatgaaaggaattggaagagcacgatgtgaatcacaaagagataaaagtaaggaatatgattaaggcgacgagtgcatagtcgctatatgtggtgcgtatgtaaagtctatatgatatgtacatgtgtacactcaagggtgtgtatttcaggtttcttggaatcaaagaagcgcagcgaagggcgaatcggcaacctgcgactccttccagccaatacacttccagcagctcaacaaacctctggggtcgtatttcttcttaattctcaacaatttcgcgtagttatcaccccaccacgcctcgatccaatcaattgtgaacgggttggcctcgttgctgtacgcaccactgccaggagtaataccctcaataatggccgtcatgttttgaattgattggatcttctgtttccgggtgggaagggtagcgttccagtcccaggtggcaccggatcccagctcccaaatagcctcccgccaggcgggagaagcgctggtcgatccttcggtgtagttgtacaacactggtccgacgacggggatataaggtgtctggcccagtgattggatgactgcgaagtaatccatgaggttctgacggccctcaacggtgttgaagatggagcgggggatcagtcggcttccggggaagcgagtgacgccgacagcgacggagctggtcttgacgtatttctcgtaaaaggggtaccaagaagtgaactcctcgatggtggcagagccgccatttgctttggcataggcgatcacgcttgccagagagacctcggcctcctcgacggagaggaaaggagagatgttgacgagggtgttaccggtgatgtggccgccccatccctcctgtccccatttgagggtgttgttgacaacgatctccatgaatggaagcatgttggtggagttgctggtgaacttgatgttggcagcgacaaagcggatagcaggttcgacatggtgagtgctttcgaggaccacgccgaaggttccaccgccgccaccgcgaagggcccagaagaggtcgcggttctggaattcgttggcggtgcggtagacaccgtctggagtgacgatcttgaactcgaggacacggtcaacgccgagaccgtacacggggctcaagatggaatggccgccattttggatccagccgcccgagacaccgacggtgggtgagtagccgccgagtatggttacgttttttgtctgtgcaaattcgtaaacctcgtcgaaattgactccagcgccgacggtgatggcttgatatctgcgagaggtgttcttagagtcgcgtggagcgaagtccgcactgtactgcatagatttcaggtttcgcgtccaaagggatagcgtgtcacgcccactgctgcgagtgaggtaatcatggccactatttttgatgacgagcttcttgccggagcagttggagaacttgaaggcttcaatcacatccttggcactctgcacctcaagatagtgagagggtagattaccctgacgacaggtggtattcacaaatgctagggggtccgtcggatcgctgctgtcgaggaggcactgatcactagggtcggatgcccacatctcatcctggttgttcatgtagccattaggataatttgttcgcatcaatggatccgagtagttggcctggatagtagcacaggcggcattgtcgcgagccactggtttcccattgtagttggagaagcagggcaaggagaaaggagtgagaagctggaggcgccctgcaacagttgcattgaagtcattcaaagtgcagtgctttgcaacagtcgagcttactaaggccaataggaccaggccggaggacttggccaacatcattgacgattgcagaagaaaggatgaaaatcacgacacagaaaaagtataactcagacagaagaaccagctgaggagaaaaggtgtcttacttgtaactaagaatttaacctatttcggcaaaagatcaccgcaatatctgcacgatctatataattggctggcccttatattaatcaatcttaagatactatcctgcagactccaaagcttgaagaccggcaaggaatattgtatttccaccggaaatcccactaattattccacttattattcccttcagaaagtgaatcgtccaatggtgacatctagctctccacacaagtcgaactagttccaatcagatgccggtgaaacctcgtataaatcggccctctacaacatagggaatgaagcgtatcatctatattaaattgcctgattattcgaaacccaagagattattttcgtatctagatatgtatacatactgactacatgtagcagagagagtcaattaattccttgttggttaccgctgtaaaatgaaaacacgtaatttatttaaggtggggtccaccatccctgatcgggactagcctacagtcaactgccggtcggtgggtcctgcatgtatgaaaatggaaatgtccggaaaatgtcgatcctcccccctgttcgtctaagctccccaatcactcggttctcggttctcggttctcacgaagttttgattttttctatcttcccaccatgtcaatatggagcaccaggtgaatgtctattggaaaaacgtcctcacgattgtgccaattgttggggcgggcgtggctactattacctacctgttacgtctatactgcaggcgggtgaaaagggtggggctgttgctggaggattatctaatgggcgctggtctgatcctctcctactgtgtcacagcttttgtagtagatagtgagtattcctccccatgaatctatcatactaactatactaactattaaagccgccttcaatggcgtcgggctacccatcacatcgcttcccaaatatgaacggatgcgtattcaattcgtatgttatagcttataccgtggtaatggaaagatctaacagcattccgcagggatcatggatgatacagaagttctgggccccgtcaatggcttttgtcaagatctcgattgtcatctttattaaacgactattcggctcgatacgtgcatacgtcattatcaccaattgtctcgttgcatttatcgccacatgggctctcgctgccctgttgaccaataccttccaatgcacaccggtgcaatactactacgataaggatttggacggacattgcatgcccgggcaggttcaattcttccaggccatgggatcgatcgcattggttgaagatgttatcattctctgtctgccaattcccgtattttggaggttacagatcaaccgtcggcagaaaatagcattaatcctggtgttttctctgggtggactgtgcgtgactccctccttccaaatgataattcctttccttctaatgatatattgcagtgtctgtatcttcagtctgatgcgcctgattgaattccgcgaattccagctcaccgaccttgcgggtgcgttcctatccccagctcgtacgatgattccaactaacatcatccagcctcaagcgccaaagaatccatctggacttgcctggaactcgacgtcgcgatcatttgtggctgtctgccgtttcttaacccacttgtgcaaggcgtccgcaacaaagtcagaagtgacgcctcaaaatatcaatcccaaccttctgccggatccaacctgcatttacactcgatgcggggaaacaaaggcgattttcgagagcttgatagtgattgtggagcatcagcgaactcaatcagtcgtaatgctacgacaagtcggcagagctcggatatggagaataataggcaggatgtggatggacggtccaacaatatcaggccttcatgatttttattcttaataatacgtatttcaattccccaatacatagtttcaatacttctagatatctcttacttcagaactctctcactttagatatttctcaatttagtatctcgttgtagtatcccatccttcacaactcattcttaagcccacatggccttgaacttgttatcaaactcggcgtgcagttctttgaaggccttggcaaccaagaacatggatcggtaagaattatccactggctcttgcgtatttttagagctgagcccgttgctcgcatctttggaagcattgatggcttcatcctcaatttcatcatcttcatcatccatctcatcctcccagctatcaatcacaaccttcttcgcccggggccgagaggtggggacgggggcagcagacgcctgcttgttgtctagtttgacgtccatctttccagcattttcagcctcaatctgatcaacggccttatcatccacgagattttcgtaatcgtcgcctccgccagcaacatcgagcatgtctgcaccgatattgcttccaggcttgaggaagccctcaatgctagtcttaatggtagccagagtcaatgagaagtcgttcagcacaaaccagatgtctccgcgacggatgcggtttgcagtctccaactgagaaacatttccgtgcttgaagaagtcatacaggtatgcattgagagggatggcgttctcgttgggatcaacagccacatatggaatgacggaatcctcaatccaaacgccactgcgaaccatctgactgagttcgaagacagtactgcattggtctccgtttcctgaaagggcgaagaatggtgatatgattgatggggagatgtggtcaaactgcgagaacccgagttgctcgcaggaactttctccaccgcacttgatcccactgaatggtagcgaacagtctggttccttgatatgctgctcgacaaaagtggagaaatagccagtgtagacatctaggacctgtctgttgtgagcacgtagggcggaggctgcttttctcggtaaaggtggaagagccacgatcgaggaaggcttcttttccgcgttttggaaccgttccaaggtggactctcgcaggggaatacgcccgaaaaggtgggccatgaccagcatcagagtttcaagagtcttttttggctttgtctctatgtcctgacagagatcttggaggtatcccgaattcagtagggcatggaaagcaaaactagaattctctgtgtagtacagatgagagatacagcccgcaaaattcacagccatacctgtactgctaagaagattgtttcgtcggaggtattcgatagagaatcggagatggtggagcaccgtctgcttcatctcagggccaccgaggtgaatgcgagaacttgagaggatcgaattgattgatttcacggcagacggagcttgctttgatccatatagcaagatgaacaaccgtagaaccaagcttgtcgtaatggggaaatgtccactgagacttgggagtctcgaactcatcagtcgttgcaccttggatggtgggacctgctggaaaacaacatttcccaggacatcgaatccacggcgacctgctcttccggcggcttggcggaaattcagggctgtcaagaaaatggaatcgcctgaaaaaacgactgtcttacaaggcatgttgatacccaaagccaaagttccagttgcaataacgacacgtaaaaagcctttcctaaagaggatctcacaaacttgacggtacttgcgattcataccagcatggtggacaccaattcctcgctctagggcatctatcaaccattgaggcaccgagcgccactgcaactgcttggaataaacaaggaactcggaagcgggtactttcttgaagtcagccaaatggaatccatccacaggcctcttcggatcaaagagatcaagccagccgaaatcggtagatgctgattctttggcttgctctgccttggaaattggctcttcgtcagcgtttccacttgttttcttcttggtagccctttcaagcttcttctttgctgacagcttggatgtcttccatacttcccatttggcaatcttggatttccataccggactctcttctttccattttgtctcggcattttgtagctgtgtcaacagcgattggcatatatcttcacatctaccgcggtcataattgaagaatagcgcggggagggcattctgagcgtgtaacgaggcgatcaaagggagggttgtgtcgaccaggttcccgtgtagggtgccagataggccattcatccgagacacctgtttcgataagtccttttctttctcgactacaaaccctgttgggtgttcgagatggagtaaaagtgtctcaaatggagattcccggtctttcatccactcccctaacaactttttcagttgtccctgccactctatgacatgtactttttggatgacagtattcgagaaaaagatggatggatccagagatggatcaacagggaactgctttgtttgaaggtccttcattgctttccagagggtgaagcagtcacgtggctcaaagtcaagatcatctggtatcgatctggtgcggtccaaaaggctagtgacaggatgaacgaacgtcatatcatctgctccatcgaggcccaaacgggccaagctaggagtgctggaaaaccctttgaacgagaagtcaccatggggctggtacacgtacttccgcaagtccgaataacggtggtgatgctggatcattttgaggtcaaatccattgcttctctgggcaaaatcaagccagttgtagaattcctggggatttccgacggtagccgagagtgctataattgggcatggggacatcagaagcagttgttcccaaacgacaccatcatcggcctggccaatgcaatgaatctcatcaaaaatgatacgcctcaagcggggagtccatgcattggcgttcgagggattaagcagcatgatctgaagaatctggggcaccgtgatgagaatttggcatccctgaggattattgatgcggtagtctcttgtgtggatggcccaaaccgatttcccgctggttttggctgggaaggttttggaaaatcgggcttggacctcagctgcgatctgattgacaagagcttttgtgggggcaacataaacaagaattccatcgttatcttctttcaaaatctgtctcatcgcatagaagctgacgaatattagcataactctcaatcaggaaaaattgcgacttacgaaataaatgtttttcctgcactcgttggggccacgatgaatgcgctcttctttgcatcgatctggtccagaacttcacgctgccagcggtcgggcgcaaaatcaggcgtccgggagtcgggcaatgagtctatgctgcgctccatgaaaggcccaccatgtagaagctggaattcaactgggctcatctcaatactcatgctgggtgctgctttaggaattttgaacgccgggaaagatagtttctgttcactatcggcatgaagctgggcagctggcaaaccaagtacttcacagacagtcgagacatatgcgacaatatcggatgagataccctgcttgattttcacaagagaagttacgatctcccaaatgcgtgtcacgatcaacatatgctttttattctgcggatttatgcgttcgaaaaagagaaggcgtagcaatgtatcaatcatgcaagtcagaatttcgggctccagaacctgtcgactgtctttaggtagactagttaagtatccgttgagcttcgtaaaacgagtcacaagatcatcgatgagagaaaattcgtcattgtacacgtttttccacttctgtctctgtttttgagtgacttccattgctttttgatgaacgaaagctgcggccatctctttggtggatggtttaccagatttggagtgagatttcttgtctgatttcgaggtcgtcgggtgggttccaacgtctctgcttgccgaaggagtttggtgagacttctgacgtgaactactggaagattcgacaacaatcggctctggttgtgatccagagagacttgcagcataatctctcatctcggccataaaacgctggtttcgtttgtggtttcgctcaacctcttggggggttaggatgactttcttttgatcaaggggcctggagctatgccagtggctatcttctttgaactccttgaaaacttgcgaatcactcttcgcatcggcagattcatcgactacgagctggacaggctccagaattttatcgaagactgcattgctaaatggaagcaccttttcaaagccatgataaggcttagagataattccgtgagtggtatgttccaagggagcgggagctcccccaatcgcttcacattgcagtgttgttccacaaatgcggtccaccagagacgcaagagtgttgaacggggattgtgtggccgatgaaattactgtttggatgccgagtttctcgaccatccactggactccgaagaacaatgttccgtccacgaggtcagacaggtcgcaaggtaggctatggtcgctcatttctttctcccaaagcttcgagctgagcaaagcattcgcggttttcacgaattcattgaaaaacttcaagtttttgggtacagttgttgtttggattgatcgatccgacagttgcgtgttttgtaaaagtacaatgtgcaaaagcatagactgtgctccaatcttattttcgaggctatccgtcacgctacccaaaagcatggagctaagcgtagcaaccaccagacattggcgctgcgacagctcgggcttctcaagaagtgcctgttgaagaaagttatctgtttgagcctggtttgacgattcgtttttgatggaatcgtagtccagcgcatcctccgcttggtcttggctgtcctcaatatccaattgggagagggaattccacaattgatcgggatcgtctgtttcagggccagtcgataagggattcgtttttatggagctttcaatcaccattgccatgacctgcgtatattgtgagtacagagcttggtcttctgcagctgaaaagacctaccttggtgtcacggaactcaagactattgatgagagcaatgttgtatccgtggacaacgaaccagtagatcatcgcgcggagcttgaaccttgagatctcgcctcgcttatcgacaaaagaacctttctggtcaccatcttcgagatcgctgctgtcagaatcactttcagaatcgctgctgtcgatatcactagcaatatcatccttgttttgctcggaagaagcaccatcgtgacacatgaacaaataggcccccgaacttatcagatgagctttaaactcatcggactggaagttatcaaacctcagaacctggaagtatcgcgatggttggacgcgaatagacacaagatgctgtatgatcgcctctcgggcaaggaggtacctcgcgtggaggtctctgtgagctcccttgggaatgcataatgaggcattctcggcgaaaaagacaatctcgaagaaacacttgcgctgttgaagcttttgtaacaacttctcggcaaggtaagtcgcatgcaagacctggaaaccagggttgaaatcaagtttgtcgttggaaaagcattcgagcagaagcgaatctccttcgattatgaaaagctcgtcaccaacaaagtcaccgacgaggtcaacgacccgagagtctaggttattgtacctttgtttaatcattagtaaaatcgagcgaagtccgaaagctgcaaagccagtgctcaccaatctagcacaacatggcgatccattatcttctcaatatttgcgggggtcgcctagatggctggatataaattagtagtgtcaagaccggaggatcggcattttgagcgacgaacaggatgaaccaggtaagctaagctagagcaagggaaacaatgtgtggcacaaagaaggagaagatggtaaaatagaaatttgggatggccttcagggaaaatatgaaatgcaaacgttcagaaggaggggcattaaacaggatatattgggaatgtgttgggcatgtgctcagtcgactcaagatccaacaaaccgcttacctatgatattcagtgtgatggggctctgactcattgcctctaatactctttttggcggcgtaaagacagtatctagaatagttgggctcttgatttctttgggtttacaattgtgaagggattttgggcagaaaagccaatgaccgccttctccagtatacgatgtacggcagtatacaacatccaggatagatcaagagcagacatccgatatttgatatttgtgaaatgtcgaaagccatagcatgggccaagatattgtatattcttgtagcattttcgggggcttggcaatggactccgattttgttccgactgggtaactcaaaagcccacggaatgcttcaacggctagttggaagcgtaatgcattttattttcctacttgatatgatttgataaatatttcgagacatccaaaggctccaagttccacaaaaaattatgggcagttataagtcacaagtcaagggatatgtgtgatatttctgttaataaagaaataagcaacgcattccttctctcctgcggctggttttcatggagatccccgacagacacatgacctcatctcgcggcaatggattaactgaattcgatttggctttgcgaagaccaccacgaacaaatagtgcaaagaaatgagaggggaaaaacgatacacgcaatgtccagactcccatcaaccgtcccaatcacccaattcccttgggaataaacgccaattcctcgctaggaaggtactcgtaaacgaagcacacaaaaaaaaaaagacctgttaggaatgggccgcttgggaacattatagcataccggcgaaacccacattcgtctcgtgtccgaagccgctgcgaaggctgccgaaatctagtttcatgagcagacgatctacccccgctgctttatggggcacgtaatgactgaacccggggctcgtgctgtcatcaacgtgccgggaaccaggccacatatgaccgaagttcgttgctagttccacgggtcctttgccttctcccgagcgactatcgtcaatgtcccgcagggtcccaacgagattcttaatacccgtctcgacatcgtttcgagtggtacgtaactcttcccatacatcgcgttcttcctgggcataatccaccaacgcgtcttccacgccttcatctgtttctagatccatgttgcgttggatggtttccaaccggatcacaagggcgacgaagcggtcgatatttgtgagtagtcctctcatggtgtttgtgaagggtagttcagtcaaaaagagggactggaccagcgatgacaagtgccgccggtgtgcaaccgtgagagcctcgggatcgtgccgtcccatggtctgttggccagactcggggaagtctctggtcggaatctggttaggagacactgtcttggaactatgctgcgatttagaagaggatgcggttccaggtcgggacccaggggctgatgctgtagatgaagagcttccttcaatccattggcgaaggtgctgccacgactcattgacaacatctccttggaaaaagccaccgatctcggaaagcataaatagacatgcacttcctgtggcccagatatgacgcatttggcgaacacgggcattatctctatctcttcttgcctttagctttgcttggccaaagatactgttgcttctgggcggtccccatggcgtagggtagtttcgccgcaacggagttcgtttccaaagatccccaagccggatttgagcccgccgtattcccaggagataagaatgaatcttagaatatatgacaatatcagagctcgagatgaacaggtctagaggagctcggatatgtgaagtgagggttgtcggcgtggggaagagcaggtcttcaaatgagacctttgagattttggataataagttgggagtttgggcaggcgtcatcggtcggccacttttgcggccactgatggacagagaaagaaggtcccgggcaagttcaagttcttcgtcggccgggtcctcctccttttccagcgagaaaagctctgcccatgcttcagctagagcagctgtgacatcaccttctttgacggtaaggacgtcaggttttcccaaaggacgagtcgctgatgggcctcggcgtcggctttcctcaatgcgggaatctgcatgtgctacaagagctaccgcaaactcccctcgtcctagtaaaaggaaattgtgaagcaaagtaagaatttctagaatttttgggaggggcaacaatttcgacaaggttgattgagaaagggaaaggcgaatggagtcaacggcggtagtcagttttgaaggcgaaattggtgatttcaggcctgcaagttgctcgatgtgctcccgatataacgtaaccggcgcagtagaggttcctgctattgaggttttccgtttcgcccggatatgattgagagatttaccaatgaatagtattgagcctgctgtttgtgctgtgacaaaatttgggagcaatcggacgtttatgctgaattgtgcctcgtcattctccttttcggtatcctcttggataaaaaagtcctccttcccgtagatgggaagattcccataaagtaaccacatcgaaagctgtttcatccatgctgtctcagccgttgtcgctaattgcagggccatgtctttgatatcgagatatcctgtttgagcttcggtccgcaggtgatctatgagcgctgcccccgtggagccatgcaaaggttcggtgtttttcctttctggttgaatgaaccggataatagtccagagccattccatgcgccgcgtccatggtgcgaactctcccacgatagtcgacaatgggacaataccataccctccgacatatccgctgtcctcggcaaggattgccctctcaacctccaggatcttcttctggaattcacctagatgcgttccaataacagctgtggagactgagcggcatataactgatggactcgcagaggatatatcggaggcatatttccgcagctgcgcgtggagtcggcttagatggacaacggaggcgaggagagctttctccggaggtgaaagaaggggaaagtcatcttgagcgacagaattctccttcctttgtgtacggaagaggagggatggctggccggagagggagagtaggatctcatggagcattctgacgagagttccctatcggatccatatcaatcacgagctcatcacaggcgtatatgcagataactcacctagggaaattccttctctccgttggaccgttcttacgctgccagtataatagaccgcgccccacgaattcaaagcgacacatatgataaagcgtttgacgacgccaagcttcgcgttgacgccgaggcgcgtcaaacgtgacgtgtgaaatagtaggcttcagaaccaatcggagaagatagaggtggttttcattctccagagtcgaccccaatattatctagatatcacagcttccaactctcaacaagacactctgtgactcgagaacagtagctcccatggaagaatcgcggggcctaaaggccaatcgtcgtctcaccgcccgttagtcatctcttagctgtcggcccctcttacgtcggtccctctctcgatctctctcatactctttactgacttgtcctttacttattcgcacctcctaccttacacagtgttccattttctcttttctttcataaacctctatcgtccgtcgattgcgctcggattttgctactcttctacgtgctcgttgagctaggtacctggtacgctaggcgttgcaacttgatttatcatcactattgaaagacttgctctatcgcaaggctttcacctcctgactttcatcattccttcaaacattcctgttcgagacgcggctaagcccggaaagcgcagagcctctgaacacgacgtcgtcggagctcggccagagaaaagaaccatgacggtatgattagtcttgatcttagagataagattgccactaatatatcttaccaaaggacattaaaatgcaggtcgagaacccccaagaaaccatcgaagctatcaagcatggggagatcgacgaatcattgtatagtcgacagctgtaagccccccgcatccctcttatgacatacagatcccgagtatgtgctgacaccttagagatacgttcttggtcacgaagccatgaagcgcatgggatcttccaatgttctgattgtaggtctcaagggcttgggcgtggaaatcggtatgtgattcaactattaatcaagcctcgatttcatcccgacgtctgattgtctccatagccaagaacatcgccctcgccggtgtcaaatccctcaccctatacgaccccgcagcagtcgctatctcggatctttcttcgcagtttttccttcagccagaggacgtcggcaagccccgtgctgaagttaccgccccgagagtcgccgagttgaactcctacgttcccgttacagtccatgagggccagagcctcgtgggcgatctcgaacgactaaagcactaccaggcagtggtgctcacacagacacctttgaaggagcaactggtgattgctgacttctgccacaagaacaacatctaccttacaattacagacacattcggtctctttggttatatcttcaatgactttggaaagaacttcactgtgggtgatcccaccggtgaagagcctgctggtggaattgtggcggctatcaatgaagaagggttggtttcggcgctcgatgagacaaggcatggactcgaggatggtgactttgtcactttcactgaagtcaagggcatggatggcttaaacaacagtgatcctcgcaaagttactgtgaaaggtccctatactttcaccattggtgacgtgtctggtctaggatcctacgagggtggtggtctattcgctcaggtcaagatgcccaagttcattgatttccagccactagaggatcaacttaaaaagcccgagcttctcatgtccgactatgccaagtttgaccggccacaacaattgcacattggtatccaggctcttcataagttcgcggagactcatgatggccaattacctcatccccacaatgatagcgacgcccaggaggttctgaagatcgctaacgatcttgctgctactgatgaggaaaaagtcgaactggatgagaagataataaaggagctgagctaccaggcccgcggtgacctgaacccattggcagctttcttcggtggtatcgccgcccaggaagttctgaaggctgtctccggcaagttcagtcctattcatcagtggttgtactttgactctttggagtctttgccctcatcagtcactcgatctgaagaaagctgcaagcctcttggtacccgctacgatgggcaaattgcggtgtttggcaaggaataccaagacaaacttgccaatgtcaccgaatttttggtcggttctggtgctatcggttgtgagacgctgaagaattgggctatgatgggtctgggtacgggtccgaaaggaaagctttacgtcaccgacatggaccagattgagaagagcaatcttaaccggcaattcctcttccgtaccaaggacgtcggcagactcaagagtgaatgcgcgtctgcggccgctcaagcaatgaaccgagaattgaaagacaagattgtcactcttcgtgatcgcgtcggtgccgacactgaacatgtattcaatgaggatttctggaacggccttgatggtgtgacaaacgctttagacaacgtcgatgcacggacatatgttgatcgccgctgtgtcttcttccgcaagccattgctggagagtggtaccctgggcaccaagtgtaacactcaggtcgttcttcctttcatcacggagtcctactctagctcccaggatcccccggagaagtcattccctatgtgtactctgaagagcttcccgaaccgcattgagcacaccattgcatgggcacgggatgtcttccaaacctacttcgttggtccccctgaatcagtcaacatgtacctctctcaacccgactacattcagcagaccctcaagcaagcgggtaatgagaagcaaaccttggagcacttgcgtgacttcttggtcactgaaaaacctctaactttcgatgattgtattgtgtgggctcgccaacaatttgaagcgcagtacaataacgcgatccagcagcttctctacaacttcccccgagattccaagacatcatccggtcaactattctggtctggacctaagcgcgcccctacacccttgaagttcgacagcactaatccaactcatcttggatttgttattgccggtgctaacctccatgcgttcaactacggcatcaagaaccccggtgcggacaaggactattaccgcagggtagttgatgacatgattgttcccgagttcactcccagctcgaatgtcaagattcaggccaatgaaaacgaccctgatccgaatgcgcagccagctggtttgtccaatgacgaggaggaaatccagaaattggtcgcatctcttccctcgcccaagtctcttgctggtttccgcttgcagccagttgagtttgagaaggatgatgacaccaatcaccacatcgacttcatcaccgcggctagcaacctccgtgcagacaactacgagatccctcaggcggaccgacacaagaccaaatttatcgctggaaagatcatcccggcgattgccacaactactgccctagccaccggtcttattggcctcgaactgtacaagattgttgacggcaaggacgacatcgagcagtacaagaacggctttgttaatttggcccttccgttctttagcttcagtgagccgattggtagcgaaaagggcaagtatcaaggcaagcaaggcgaggtcacaattgacaagctctgggaccgattcgaggtggaagacatccagcttcaggagttcctcgacttcttcgccgagaagggtttggacatcaccatggtcagctctggagtcagcttgttgtatgcaagcttctatcccccatcgaaggtcaaggatcgccttcctctaccgtgagtatcttctcttctatagctagccccatgcgtgagttagattactgacattgtaccttgcagtatgagcaagcttgtggagcacgtcagtaagaagccagtccccgagcatcagaagaatataatcttcgaggtgaccgccgaggaccagacagaagaggatgtcgaggttccctacgtgatggtcaagctcacaaaataaggcgattagaatctacgaaaagccggttggctgcatattgctagtacaataggtagatttcatgactattccactctccacagactctatatgagtacaaatatgtgtagaatgaccagtgtaaaccacctgtgtacaaatcaatatcaaatcgctcaaggctgtgccaagaccatccagatcgctttgtcaaagctgatcgatcttccgataagcaaatctgactcagcatttggtcatgcccggggacgtcatgaccccgcgaagacgacatttgtattctttctatatataagagtgaattccactgtgtctgccgcttatgttctttactcttctgagatcccaaccattgaagtgtattctacgcgcagggcctcttcgtacagttcaccatagctttgtgttccccacagtaccaatcatctactcccgcaatatggctgtaagaaacacaaaacacggccacaacagctctcttggctacgctaacttatatttcaagaccgtaaattccatgaaaatcaccgattgggtgaaacccggcgacaagtcgggcgagttcaagcgtcagcaatccatctttcggaactggatctctagggaggctggagcccaattccctccagagaagggccggtaccatctttatgtctcttatgcctgtccttggggtatgaaagaacttccaattgactggccactcgatcggtgactaattatctactagctcaccggactctaattactcggaagctcaagggcctcgaggacatcatctccttcacttcggtgcattggcatcttggggcagaaggtcaaatttatctcatgagttgtggggaaatagcattgttctaactcatatcttaggttggcgatttgctactcccgatgagaaactgcccggggagaacactattcccgatcctctacacccagacttcacccatatccgacaagtctatttctccaatgatccagactactcgggccggttcaccgtcccagttctcttcgacaagaagaccaagctgatcgtaagcaacgaggtatgaaacaatcttcccaaagaagacatttccaatttcatattcttacaaaaccagagctccgaaatcatccgcatgctttaccatgaattcgacgatcttctcccagaggaatacaagaaaatcgacctcttccccaaggctctacaagccgagatcgaagcctccaacgactggatctacaacgacatcaataatggcgtttacaaatctggcttcgcgaccacgcaagaagcatacgagaaagccgtaacaacactcttctcctcgctagacaaggtcgaagatcacctcgctaagcagcaagcagcctcgaagccgtatttcttcggcgacaagatcaccgaggctgatatcagactctacaccaccatcgttcggttcgacccagtctacgtgcagcatttcaagtgcaatctgcgtgatatccgctccggattccccgctattcaccgctgggtgcgcaagctgtattgggagatccctgctttccgggatacgacggacttcgagcatatcaagttccattatactaaaagtcacaagcagattaatcaatttgctatcacacctctggggcctgtgccggatatccttcctcaggatgaggaggttagggctgtgcaggcggctgaataagggtttggcctcggaaagggtgcttcagcgattatgcccgtttgcgactcgcgaactgaacaatctaagagcaatctgagtgttatctcaaagtatgtatttgtccaaacgtgcagatttccttgtaatagtaaaaaaaaatggggaatctaaaagtcccgtggtattatatcgacgccttgccatgctgatgtggttgatggtgagtttcccaatgcccctgtatcaaagtttggtcaaaagtacagttgtctcaagtgagcgcaacataagcaataaagtaataaaagttacaatgaaaccttgttgatatatgcagaaaaaagtcaaatatcgtgatcgatgatcgttgatatggcaaagagatcaagaatgagaatgggatgcatttcagatgcacccatgagccagggggtggatgtgccatgcctttcaatggcttgtgttgtgggtatattgggacaacgcttctaaatttcaatccagtaaatagcaaagatcaatccgaaggcaccggaatgaatgcgaagatcgagaatccacgcaaatggctaggtgatgtccacggggatatgcaaggaggaagaggaagtgagggcttgttggggctggcagatcatcgtaggccgagaatgcgtttcgcgttctcgtagaccacgtagctgattgacatggccggtgccactttgagaagattaggtgtgagacctttgtaaagaccacggggtccctctgctttgagtgtgacgcttaggacttcaccaatccctgtgtatgtaggcggatgcaaaatcgtgccttgagtttgaagtcgagtgcggagaacattgagtgggtagacaatcgaggcgctgaatcctccactcatagcaccaattgcacctgtcgcgaagttgccgaggggaacgtcatcctcatggcagccacagtcacgagcctttttagctatgagtgctcgtttgaggtattcaaatgtcgatagatcgattgcggcgtaggggaacatccccacaaggccaagcggtagtcctcggaagaagccagccaagccattcttattccatacctttcttgcggtagctgcgatgagttgattgcctttcgggccacctttcacggtttcgcattgcatgcgactattgataactatgagccacaatgctctcacaactcactttggtcgatgtactcacaattttagggtatcgagggggtaaacaaaacatctagtcacaatcagaaccgacttgcctttcatagataacgcgcaagacctactgggcaaccattccaccaaagccacccgacatgaactgtgaagtgggacgaagtcgcttgggatcattgtgtccttcgagttgtgcaaatgctcgtttcgcagactgttctctggtcagtattcgtctagttgtgtaggcgaaatcgaatagcaagattacaaacctcataggcaccaaacttgatcgcagactctggcataacctttaccacgttcaagccattgcctacttatagttagtcgctgccacttcgagtccaggttgacaatatgacaaacctgcgaacaaactccgtattcctccagcccgccatagttccttgagagcgccgaacaatgttctgggatcgttccccaccgcagtcaacagggatccgtccttcgccgcctgaaccgttgatttgacgctagtctgcgcaatgagatagattttgagacgatcgaggggggcggtggccgtccttgacacggcacccgccattccacctgcaaggaagtagcctaattgaggggtattttcggtcaacttccgtccatgatatcggaaagacatccgcatggcggtagtctggggaagaggcagccattccaaatccaagtcggcgtctagcgagacaaattcatgctcgagaacgggttccggttttgagatctggctggtttgtgcgtgtgctgaaggaaggaagggggccaaggcggggagggacaaaaagttgtacaaaacgtgttggatggccggaatacaagatgaaagaaacggatgatttgtacctaaaccctgcaggtcattgatgttgacatctccttccgggtttagattgcccgtggccgtatagtatgaaaggactgcgcgtaggtcggtcggggattggagagggaggaatagaaggaaatccctaaaaaaaagagaagggtaaatttgttagcctaggatttttcagccttcattgaccagagtgaggatgcgtatacctccactcagtgtaagagatcacgccgtcatggttcttatcgacttccgcgaaaaaccggtccaacttggcgctcgagactgtgaccccggaacgtgaaaaggcattccgcaattccatcttgtcgatttctccgtttttatttcgatcaatgctctggaacatctgccatagtccgtcctcggtgcggttgatgaatgctcggaattctagtggtgattaggattggaccaaatcttggccagggcaccccttcgccgagtgatccctaggtggttctcgtgagcttaccggcttggtcgatacgtccatcaccattcgtatccacctcccgcgcgaccctgagtaccatatcgtctgcattttttagagctagaaagagattagacaagcgcagatatatagcaagaaaccaggtccaactcacgatgatcaattttctttaaccccttctttaacccattcaggtcgatatggccctctcgtcgagtgtccaaggtttcccagagtttggcgactcgtttgtcgcgttcatcttttgactctccggatgccatgataaaaaaaattgttaccgagcaaccattattttctttgatacttcgttataagaagtctttcgagcacccaagacccctagaagttgaggggaagaagatcgaggggaacataaaagtatgacgtgaggtaaaaggtatgcccagccctggaggtgaacatggacgggtaaatgcccaggtgattaatagacgcccggcgatttgaccggctttgacgccatcggattatcttgcacgggaccagggccaagccctactatccctttttgggattgcaacctgacctcatatgagatgagattctgatgttgttgctttgtttttctctgtttcttttctattggctctgcatcatctcatctcactttaatacgtgacctgggtcagcgggacttcggaccatgtcgtgacggcttccaatttacgagcgttgcactatcaaacattgaacttgcaatatggcagccaactactgggcatcatcccagcgtcgacactggctattctccagggagaagttagcagatatccgtgaaggattacgggagaaggataaagttgcccattcgcagttcccgctgccggatcagcgactattaaatatctactttaaccaacgtaagttttatcaatatggtcattgttttaaatgaatgtcgggctaattcaaatcataagagcttatcaagctcggaaaacgcatgtccaccagacagcaggccattgcgacagcacaagtgtatctgaagagattctataccaagaatgagattcgacagacaagtccataccttgtactcaccacagccttctatcttgcctgcaagatggaagaatgtccacagcatatccgctttgtggtcggcgaagcgcgcggtctgtggccaggtatgcatccgtatataaagccataaaaacagatcatatgctcactatatacagaattcattaccccggatgtggcaaagctcggagaatgcgagtttgccttaatatccgaattgagctcgcaactcatcgtacatcatccttatcggactttgtccgaacttcaaaccgaactatcactcacctcggatgaagtcgccctcgcctggtcggttatcaacgatcattatctgacagatttaccccttttacacccacctcatgtcattgctatcatggcaatcatcgtcgctgtcgtattcaagcccacccattcatccaactaccctggaaccgggcaatcggctttggcaggctctatgagagatggaggcggcatgcagatgctggccgctttgtcagataagactggatccggtcctcctcctaaaattcagaagcttgtcagctggcttgcagaaggcgaagtcgatattaaagctgtcatcgagtgtacacaagagctggtctccttgtacgaggtgtgggagcaatatagcgagaagaactgcaaagaattgcttgggcggatggtgaagagcaagaacttggacaaatgatcgtgtaccgcatcctgtactttacaaaacctttatataccggtatctcaatattcctaatctagttttgacggggtttttttcctttcgtggacatttgtcatttttcattctctctctacctagcagcatacgactggtaaaagcaacccgctttctttatattcggtaccccccgcatctcgtcttaggcaatcatgagacgaatccaaggatttcgacgcgatggtgttccaacagaaagcttgtatgagagaaaactggggggaatgcaaggaagtggtttaacaagaaacaatcagatgcttaattgggtctaatgtgtctactataaaagtattcaaacgacgatgataccaccgaggtccatcggattgcatagttcgagcagacggggattccgtctcatcgaagctaccagtgccaattgaaacccaagatacgggctttgatttaagaattaccaaatagactgtacagcgaagaagagaaagacgtgaagaagaggaaatggagggggggtttatactcgcaggtggggatgtcgtgccatcctcgcgcctgcccaatccatggacagcttcatggcagccatagatcaccatgattccggtacggcaaaatggcatatcacataggcatggccctaactccgtactggattcaaagttggatttgagatcttctaggcaaaggaagcggttattcggcgattgagacaagttgaacccttaagccaagaatgaggccctttgaatacctgcattccaaatatcgttttattacactctgagtaaagagattaaatgagtatagaaatgctaattacacacttaactagtcagttaggtgtagcattgtgacctgacaacctaagacatacatcttatcaacagggcgactccaaaggtctctagggctgcatggaagaatttctcaagagataaacttaatcgaaataagaggtttgtcttgctgtcatgctgtcattctgtcaggatggcatcgactccgcaaatctatttcaataccgcccagagtctgaaaccaccttccgactcggagcacagaaacattcgccacgatgcaatagatatcacatatttaaaatccaaccagggcactggaatagttgaagatcgtgtttgccagtcccttgcgcggtgtatatggggatcggctcgcaggaataactagtccctcaccgaattacatatttcatgcattcggaccccacgatctcacacagacaccaaatcatgcgccctgcatagacgctggatagatcagctgcatggttcaagcctcggggcaacgtttacggggtacaatatgtgatctatcctacacctcaagagatcctgttccaatagccagaagggcggtgaaaccgacaactggagagccagcttacggtggtacgttgtctctagtaaagatttttttcggcgccgtgtaatcgaattgaagttatcactggtggaagatgaaaggtcggcacatcgtgtcacagggttatgtcccagtaggcgccgagagagtgggcatatcccaatgagggacaaaggacgaaaatacatacaacgtaggtaagtgaatacggaaatagctcccagacctaaaatataccacacgttgaatagtggaaactcacagttgattttgattcggtcgcatgaatatgtagtgagtcacggataggcaatggtacccgaaagaaaacaagagaaggcgccttaagcctctgccctagtccggattccgcattgatgaaccccgatttgggaaggatgtgagctgataaggtaagatctcaaggtcctctgccaataataggcgggtttgtctgcagctggttctatgggtgtgtctcaagaccaacaaggtttttttttcgggtctttgcgctgcgtgtcgaaggattggggaatttgtacggggagccgatcccaagcaagatcagcagccactgccgattcggacaccctatagggggaatggagggggaatgtgcctgggaaggttaggtcttgccctgcacagcctgcagctaaggggacccgaagggctgacaaaaatttcagcttccccaaccaccccccgggttgaggaaccttgaacggaggatggggaatttacttttccggacagcttcactgcatattcgatgatacatcatctgtattttgtccaggtcggcagtttggcggtttcggcaaatgtcggatctagataaaagcaacaatcatcattgtcgtacggagtagggcaatgctagaggtctccagatgcgcttggtatgtacacaacgtagtggcgtcactaagagatcttcctaatcgggtaaggtcccaattgtcgacgtcacgtttttctttttcagtattttggtgggccgttggagactccacttggggacgatatgcgggctctcattggtccatgggctattgccactctggctagcgcttcgatctggttggtgcgtcgatgtaagtgccttttccgccatgacaataccaaacggtaattatccacattgtccacatcacacacgcagtccactcccttaaatagtaatggtaatgaccgtaaccataccatcccccccatagcacacccctcccctctttttcccttcgcctcttcccacacacttctcattctcattaatcctcctttcctcgttcaatctcatcgatctttcctatattttctatatttttctttttgtaactttcttcttatcttcaatcttctcactttcgagtgccggcttctcaatacaatgtctgcctacttctacaaccaacaccagcaacaccagcaacaccctcaccatggtgcccatatgcagtctgcgtcaaatacccaccatgggcgctctcgtcgtgccccaaagatggcctcgcaaaatcctcagcgtcagttccgaggagtcaagagtatgcgggaattggcggaagctccggctgtgacagccttccgtgcaagattcgaagctggtcgatcctttgatctggatgacgacctcgagttttgcccaggcctcctaaccgaggatgatgtatgttgtgattggcgaattttcaacccccttatattcgtcacccccttgaagatcgtcacagatctcaatttggatcgaccattaggggcagttttgttaacatgcttgatttatagctacactccatccactccgcatccgatcgttcttctctctccagcggctcaccggacacctcgcctctgcagcaccaaatccaaccggtgcagcaggtgaccccgtccatctcattgtcccccgctcaaaccaactcatacgttcaccctggtgttgccggcaaccctaatcatgtcaactaccagcagcagcctgcgaaccggacccgcaaggtcatcccgattatcaacccctcaaccggaatgaccctgtcaagcccaccttcatcgatctcgtccgcgatgatgcaaactgctcagcgtcgatggtaagggtgccatttgccaaagtcgtaggctggcaccctacatctccattcgtccattgcacgtccgttgtttaagctgttctgcatcatcggggtcccttaatcgcaggtcataatgtttcttttttttttcctccacttgcattcttgttcgatacgtctattgcattcgacacgacacacaacctggaaaaatatctgttccacgaatacggcgacaaaaaaaatcatcaaaattcaaaacaaaaaaaccgacctgtacatacactctcctcttcgccgattacgaccaccttcgcctcatattccacatcctttgcgatactcttagcttgttgcgagcgacggcgcctgcgattcaataccttgcatccttttcctacgatacctctttcgtctctcagggagggacgaatactttcttcggcctatgtttcttttcttccggtcgggccaccgatgatgtacagaacacgtgcagtgacattgctacttgaagttgcatgttcatgacttttggagttgattctaccttttttttttgggagggttttgcgtgcaaacgactttgccagatatacacctacgctgtggcactttattttctttctacgatctctttgtttgggtttgtttttaccggggcgggaatggatatcattttcaaggatctagaggcggaaacgatacacgtctgcattgcttgggcactgttgaatatcttgggttgctttttattgctttgttacagtctacttttctcatcttttacggattgtttctctgtacatggaatttggggattggtgaataacgcttccttgccactggtatgtggtcggttgggtctggtagcgaaaccattggatgcggagttgtttctgtttgaaatcgatatccttgggggtctctcgcggtgtgcgagtctagaccgttatgcacttaaaatgctttcattattacccttctttcatctcttccattagctctatatttcttttattgccctttttgggaactcccggagagttatgacattgtatgatgttgatttgcgttgattttgcatactatcaagtatcgtcttgggagtctggctagactgggacgttgtagattgtacttgattcctgctagacatgtagatgcgtctccgaggctcaagccttctactccgagccattccaacaccaaacacagccatctcaccgcacaagtctgtcactcattaatcgacttggttcagagatggtattccaaggtcaggggtgtggttctaaatttccttttccttttcttcatagatccgatcaaaacttctcatagataatatatcaagtggtgcttggaaaatatgtaagaacatgtatatatatggtggacaaatgcctcgctttaaagaaatacccacggagtactccgtgtgtctactaggcctgcgttccttaaactataaaactaattacccaaagtcatgatcagatctctaattaacattggacacactcaacattggatcgcccgaagatcaatatgagccaaagataccattgttctatgccaacgcaatgccaccagagaagcaaaactacaaataaaaaagcaagccacacttaacatgtcacaatgggaaatcttcagtgttttaagtacggcgtacatcccatgattgggtccctacccgctggcccttgtttcaggatcaaccaactatatcccaccaacaggcctttatttcctctgccacttcttggccttccatttccatcttagtgcccagtacctatgttggaagtagtatcaaacccacgcgcccaggacagccctccccacttatctgttacggagttagtagggtactccgtatatagatatcatctgcgactccgtactatcctatctgcgactccgtactatcctatccggcgctacccccgagccccttacctagacctgacacatccccggccccacggagtatacgtctttctagtcttggactgatggcgtctactgtgaagcatgcccagcttgtgctaagggctctgcagcgcagcgcttgcctccgataggttggtttcgaaatgccaagcgctcagaagcaaacgcttgcactacaagatacgtgctcatttcgggtcgttcttgcctttagggtggtttcctcctatgaagtttcactttgtcttgttgatattgttcttatttttgtttccggtctctttgttttcctctcttctcttcattgtccgcattgtctacattatattgtactcttttctttcttttccattcttggccgcaggtattcaagtcaggactactgcctgctgacgttcattttgagacattggcattgtctttccattcattcagaacgagcctgctcgtacagatctgctgaaagttcaccctcttgtcttgtctgttttttttttcccttgtgtttcctgtccattgcattctttaatatcaagtcttcaggctggcctgatctaatcactcctttttctttccatttccacccccatattggggctttgagcaagatgcaattcattctttttctcgctgccttcttttcgttgagcttcaatgctctttccatgcccgtggctcctccgaatcaccttcaaggccggtcctttaaggtgcagagagtcaagcgcggtgattatgttcccaacggacccgcggcactacgcaaagcataccgcaagttcggaattgatgcaacaaccctcaatggggtggacgtgagcgacttccaaccttttgaaaccacggataccacctctgtgaaagttgcaaaggaagatgtagcagatcctgaccagacgggcaccgtggatgccacttctgttgatggagatgtggaatttgtctcgccggtcaatattggaggtcaaaccctcgacatgaattttgacagtggctctgctgatatgtaagttttgtgtttattggagagcaacatgtttctatgttccagttcacaaaacgaatattccgagctaaccaattgtgatataggtgggtgttgaactcgagacttccaaagtcactgcgaaacggccgaacagtgtacgaaccgagcaaatccactacctttgaagagctcgccaacagcacattcaatatccagtacggcgattcttcctatgccaatggtggagtaggcaaggatgttgtttcgattggcggtgtcaaagttgccgggcaagcattcggccttccgacggaaatttcgcagacattcgccgatgacaccaagtctaacggactcgtcggtcttggcttttcttcgatcaacaccgttctgccacagcgtcagaacacattcttcgacaatgtcgctcccaacctcgacgagccggtcttcaccgttcgactgctcagcaacggtgtcggtgagtatgaattcggaaccgtcgatccgacaaagtaccaaggcgtcatggccaatgtcagcgtggattcatccaacggattctggcagttcgactcggcacagtacgccataggagaaggccccttgcacacgatcgccaaagcaccccaggccattgcagacactggaacctcgcttatgatggttagccctgaggtcgcggaagcgtattataagcaagtcgatggcggattatacgccaataatgccaatgggtatatcttcccctgcacctcgagcttgcccaccctatccgttgcgatcgggtctggttatttggttaccgttcctggatcgttcatgaattggtccgaggttggaaccaacacgactactggagaaacaggtgagttttcttttctgtccgttcaagcttatttgaagtatgagttctgggctaacctttttttgacagtgtgctatggtggccttcagtcgagcgggagctcaaccatggcgatctatggcgatgtgttcttgaaggctttgttcgtggtctttgacaaacgcggaccttctttgggattcgcagcgcctgcttaagcaaaaaaaaatccgagatttatccgcccctcaatttgtgacaatgtacaaaaacccatgttttcatcttttcatgtgttggcagcgatgcagagaggaagaaatcccatttagacgcacaataataatacggaaactggaaatttgaattcttcatattctcatgggtatgcgtttagttttattttcagatataccgaacacttcacaccccctaccgcacagtagcattggccaagctcttaacagtacaaataccaccggaagcagcaaccagctttccaagagcaggcttaccctcctgtccatggacagcgggaacagcactgctatcaaagacgacctcacggtccgcagtggtagtgaaacccggttggaaagtctcccagatcttcttcttcgggttaagctgcttctcaggctggccatcattccagccctcaaagctaatccgctcaccggcaggagcatcagcaggcgggttaacgagctcgataggaccggcgtgcgagtcctcgccctccgcaacacgcggagacgcagcgagaaccatcgcgcaagacttgacaccgcgcatggtcacaggctttaggttgcacacagcaacgatcttacggccctgcatctcctcaagcgggatcagtccgttcagtccggaacacacggtccgcacggtcttgccggtctcctcatcgagagacgtgttctcgcttcctgggacgtcaccgcagtcgaccgtggacacgtacagcgagtccgcgttcgggtggttgatcgcacgcaggatgtgtccgacgcgcaggtcaatcagtgatggggctggtggcgcagcgggggcaggagcgggcttgggtgccttctctttcttctccttcttttccttcttgttggtcttcacgggggcgccgtcggcgccgacctgagctttggcggcttgctcggccttgccttggccgacgacgaggggcttggactcgttgttggcgtcggggttctgggcgctagccttctcccgcttcttgcgctctttctcctccttggggtcgacgggcttgggcacgaacttgacgtcgttcacgtcgatggcgatcttctcctcatcggggatcttgagcgagaataggcggccgttctgcacgaagtcgacgtgacgcacaatgtggtggtagcccttttctccggtgcgctgttcaggtgtccatttctcaacgacgggggctagaagagcatagatggcaatgtcggccaccgagggcttcgcaccgaggagggtggtacgggtggtgaggtgaatattcagctggtcgaggatctcagcggtcacatccttttggtcattggcgagagaagtcttcaggccggagacggtgtggagccattgcctgatgtcagcttcctcttcctcattcaaggtgacctgagggaagatcttggcggaggcgtggaggtagtcaggctcggtcgattcggaagagattacggcggggtacgaccgatagagaagggagaggagagatgtctcaggagctgctgccgtcgccatggtgtatgttcgtggaggggttgggagtggaagaagagaaaatcgaggaggggcacggatttgagtcaacgattggacccgcggggttgtcagtcgggcccgcaatagagtagacctgagagaattcagcttgacgacgatcccttttatatagggattctggtggaattttgactgttaatttaatattaattcaccaaagcaattgcctgatggtttttgtttcctggccgtgctgcgcttgctgactcagcggtggcctggccagcccttaattagcataacccttcctatcttacggagttcggggtcataatctgtccttccttcatgccacttacagcatagagatagacatattatcttctggcagcatgacacaatcaaatgctaggactcttccaaaactgccagcagaagcgatccgtttggctcaccttctcgatagcttctttaaaacaaacaaaacatggactggtctttcgcaccctgaccagagagttctgattggatttattgcgcagaaatatgacatggggtctactctcgcggccaatcatattacccgctatcctagaatatgggcacgcgaggagcaccgagtgacagaagcgattcaaaaaacggttgatctagcctcgccgctactggatggaagtttgagatcagttcttaaggcgaaatccatatttgacatgcccgtcaagctgatggagcttattgtgagtgatctatcagacagcgaactttccaatctttgccgagcaaatcgtgatctctacttgagtgggtggctttctcggcgaggtatgcaggacttgcgtgcatttgaacgaagcctacaaggaaatatggaataatcattcatcaaggcagtcgaagcactctttgatgtcccgtagacagtgtcgtgggatacaactccattatatgacatggtgaactacgaaaatgtcggattgatacagttcctggtttttaatggcggcttgcttgggttagaattacaaacactcattcagaccaccctacgacatatctatcaggacagagaggatagaaaggagtgcgaaccactgagaactgtttgacgtggggggctgatcccaactatcgttttcataacggctgtccttggatgtggcatgctattaaatcagcgtcggcggaacgggaccagcaccattcatggacaaagcaagaaaaggcgtgtcgggatgtgcagctgctgcttgaccatggggctgacccaaattctgtggggtctttggcgacaatggattcgatgcttcatgtagcatgcctgcattttcaacctcaaatcgtaaaggccttgctcaaagcgggtgcacaccccaatgcaaaagacgcgcgtggccgcacacccttgtttatgctattcgaagaatgctggcccaacgtacatcaaaatgaatatctgcttgatatggttcttgcagacccaagagttaagattgatgaacctgacaatgatggctgtacgcccttgggcgctgctgtgagttgtattgcaaccgtcagtcgggaatttgccaagaaagtcgttcgtatgcccgatgaagtcgatatcaattcccaagacataaacggcgaaacaccattttctcggactatcgccgtcaacgagtatgatataatccgtctactcctggcgtaggatagacttgaccccaacctcggtccgacagatgcatttccgtcatttcttgctgttcgtcttaatcaacaacagacggttgagtatttgctggactctaagcgactcaaagtcaacaagcaaactgggcagaccgctttgttggaagcgattcgtgtaggcaacacagatgtcattaggatgctcgctaaagccggtgccaacgccgatattggaatgagtgaaggcagaaccgctcgacagcagatgtcggctgcgggtacttatatcaaatggaagacgagctcgatatgaagatcaaattctactttgcttgctcctttgcttctgtgtttctataaaagggtgtttatctattgaaatcaaagttgcaccttcacagaaaagtctctagtcaatgttccgtacggcaattggaatctgatagtaaattatttgtccactttgacatggtagtctcccgatgtgaagagtggtatataaggatgtcatgagcagaaagaccttgatttaacgcatacaatgagaccccagatgaagtttccagaaattaaattgagaaattagacctaaacgattctagcaaccctgcaccaaccagaaagaactctgagtcctaaattaatatagcaataaaagaggatacaaatttgactaatatcgtcgactctttttcttccctttccctttcccttttcctcctgctctttttctcttgcgtgggtgcattagctgctcaagattgatgcccgtccgcgaaatcgtttcctgtgcagtcagacccgtgctatctcgaatgtccagctgagcaccggctttgataaggagtttgatgatatgccttgtagttggcaatgtcaaagcgagacgcccattgccatctttccggtttgggtcggttgcattttcgcttagcaatatctcgaccatcctttccattcgctgcgaaacggcgaaaaacaagggcaacttcgtagtattgagattcgggttaatattagtctgcgacagcaacagctcggtgactcttttgtttcggctcgctaccgaatgatataataccgtcctcccatgaatgtcttgggaattgatatcaacatcggaattttgaagcattctttccacaaaccaagtagagcaggctgtgttacggccagcagcaatactcaagggtgtacggccattctcgtcacgtcggtcgaggtcgattcctgtagcttgaaggaggaccttgattgtggccttgcagggagagtgggacttgacacaattatttcgaccaacggccatatgaagaggcgttttaccattggggccaattgcgtttacattggcaccatacttgatcaattcagtcacaatttctgactttctcttggaattgcaaaggcagacagtcacatgaagtggtgatgttttgtcggatatgtggatatttggatcagccccgtgttcgagcaacaggcgaacattatcgacgcttccgggccgctttgaaatcttgtatatgtcgtgctcatgttccgtcgaacgctccaaaatatctgcgcaaagagcacggcaaccacaaatagcaaccaaaagtattggaatacgcccaagatccaagtcgcgaagggtgggccaatcgctggaacaattcggatcagcccctagtttgaggacttctttaacagacagatgtttgggccttgactgttctagattgtcaaacagcgtgtctatgaggaattggcgatacaattccccaccaaacccccctttcgaagccataaactccagcatatgaatattgttggtgttaatgacatgaaacaatctccacgtgaatttatcacccatacttcctgccatattcgaaagttgttcgactgccttctcgtaaactgtcgggcgagtgttattcaagctccatatcagtgccttgatagttctgtccagtggtctccagagcttaaagccgatcaccttggagagacggcgattcgattgacagagtctaatgagagactctgtcggtaactgacctgcaatgagctgcaacagctcgttaggcaggtcaagtattgatgttgcgaatacttgtctcttccaattataaaaggcatctgtcatgaatattcgcttggcatctctgagaaagactcgcgctgcctttcgccctgactttcgcgcttgtcctccattggtcaaccaccaattcggaaaagggcatttggtcgatgcaaggattcgagagctggaaatagacatgtcagagcttccgatactctttccttgctctgaataattcaggacgatgaaatagatcagctccacctcatcgggctggatcttgagggaccaccgagggtttgcatggaggaatccaaaaaatttgcatgctgcattgattgtcgcaattgacgtggaatctaatggagcaaggttagacaacgacatactgtgaaaaccccaggtggatgttggagacgtgtctcaggaaggtagatatcacaataattcatatctgaaggctgtagagctgatcatcatgcaataatccatctttaccttggtatgatatcttgtggtatgagtcgtctttaataccatagtcacactgagcttattatggaagcttgtcgacctcttccttagaaggatggccgtctagaatgtcaatggcacctgttcaatggtagattaaaggccttggcggttcctatactccgtagtgcccagcgtgtcttttggcgatcttattatgcagtctaatccgagcttggatgtgtagatgtaaccctgatcaatcttccaaggttggaagtgtatgtacatcctagagtgcattagcgtatctcaattcttctctgtgattggtcaattgaatgacgctaaaatgagtcataatgagtcgtggaggcacagtcgatcaacaccaatcacatgacgcttactgtggacccatgtggtgctgcggttcatcccttggtcttcggattcttttatatggcctggcctcgtccttcaactcatttcctcaggacaccactcctacagagttggccccctatccacattcaccctagggtccccttcgtcattctcctatagagcgtcacgggtctgcaaaggcccgtctaagaaatccagcgatgcccgcctgcagttgttcgagcgccgcggcagcgatccagacctccgtccactggttccaacccgccctacaccggcacgcaggaacgccatcaagggcctgctgattattcgtcatgggcgaatcttcatccgtacagtgataacgacctcttctcatcgctagcgccgccgctggaaggctttccctcggctgtgccagtctgccaatccgttgacgccctcacacacgagtcggcactctgggcagaacccgatctgtcctttgccgatatcgactggaatttcgtatctgtggatgttccgacgccgtaccttcctgaccacgacggtggcgatgtccccgtcatggatctcgggtatgggggtctctcttctttcaactctctttcggattccggatcaatcgagcaccaacactatatctctacgtctcttgctcctagctccgccaattcacaaggtaggattatattctccagtcaagtcagcggggtctagtttctaacgtttaaaagacggccactcgcatccttcccctatctcttcgttgactgctcccgtctcgacctctctctccagcccctctacctcccagggcgatgatactctaactcgtgttgattcgtcacgggtggaaaagcgtaaactcaacaccctcgccgcgcggagatgccgccagagacgtgtagatcggatgaaggaacttgaagcagagttggagaaggttcggaaggaaagagatgactggagacttcgatgttcgaagcttgaaggcgaaacggatgctttgaagggcctcctcactcgcaggagcaaggatacatagtaggatactcgaagattggagctggtctcaactaattcaattgattttggaaatccgtgtctttgtctgttataagcactattcgtattccgtactttcgggtgcagatatgccgtcaaacttgtccccctacatcggtattgatattaaggaatgctagttagtatgttgtacggagtagttgtatatgttatgctctgtagtgggatatatatttgttgttttacaaaaaaaaagctaacatattcgaggaggtttgataccaagtccctatatggaatgaataaggaaagttcaaggcgaggtttataagatgcatatagttatgctgtatgcaactacctaagcgggtacggagtatttctaaggctattacggaggtcacttcagagctggccacctcgggattagctttgtacaacattagaacccgggccgtctactagaacccgggccggttattgggttgggtacaataccccggcccaatgcacagctcagcgcgagttgggccccacaggtttaatgcaaaaactacatagtctaatgcttgacataggtaccttttgtatggggccatcatagttatatgtcaaaaagatttgtaagtgatatttcctaagcagactaaagggagataagacaatattaacatcgaggttactttaagattcgggaacaaacataagcttcttagagagtctatgtcgttattatgttaaaagggatcgcactttgaaggacccctccctagacagcacgttttccttttcagaaattcctaaataatggaattctcacattatatcctctaaagcttcgtttatttggtatctatttatggctgagaaatgtgattttgaagagattgtaaaccttttgcataacggccatatacggagtgtgaaaggtaaacatatcaagaaacttgcattagactatgttgtacatagtttttgtgcctaattccgctgggccgttccgggtatgcctaaccgatcgtaacactcgcatatatttaatgaggacatttctttatatcagtgtaaatttcaaccctggaatctctcaatatttccatcgacaaagttcactcttcggcccgttccacacaagcacacttacccgttaacccaaaatccattcatcatgagagctgtacgcttccatggacgaggtgatatccgcgttgatgagatcgaagagccagtttgtggtgatggtcaggtcaaggtaagcttagcattcatgtttatgcgttcgcaacgttacctccaatattctaacaacgaaccttgatattaacagattcgacctgcatttgtcggaatatgtggcagtggtcagtaacgtgcgacccaccgttgactagccatttctaatccaacccagacatccacgagtatcttgctggcccaacgatcgtccctgccaccccacacccattgacagaccaaaagctaccaacaacactgggccatgagttcagtggtacaattgaagaagtcggttcaggcgttacagggttgaaggtcggggatcgggttgcagtgaagcctaacctctacgactccacatgctcaaactgcacagtgggcaggttcaattgttgtgagaaagtaggatttatcgggttcagcagtaagccatactaagtcttgtacctatgtatcgatattgacagctacacaaggtcagtcaggtggtctatcggaccacgcagtcgtggatagcagacatgcaattctgctacctgactccattcccctcgatgtcggtggtaagaatgaaccatttccaattcacttgtgttttacgtgtttcagcgctgacggggtgtggtggtgatacagcattggtggagcctcttgccgtcgcatggcatgccgtaagccgcagtcctctgcagctaggcgacacggtacttgtggttggggctggaccaatcagtttggctatcatccaagtactgaaagccaaaggtattacctcaatcattgccgcggaggtctctccgcggcgacgtgaatttgccctggccctgggcgccagtgaggtctttaatcctattgaagtggatgtaattgcacaggtacttgccttgacagacaacgtaggtgcagctatttcattcgagtgttccggggttcaggctgggctcaatactgcgatcgctggtctccgggcgcgtggcacgacgatcgtcgtttccttgtgggaaaagaagcctactattgatgcttctgccttcgtattccaggagaagcatgtcacaggagctgcgctttatgatgatggagactttgaagctgtgattgctcagattgcttccggtatgtcttgtttttacttcctaattagatactctctgctgatctcttgcttctttgatataggcggcattcagcctcactcgatgatcactagtaagatccgaatggaggatattgatgagaagggattcaaagccctcatcgaggagaaagataagcatgtgaagatcctggtcgacatttctgcatgaatcacgcggttagctcacatgtctgtatacatatttcaattttgaattgatttttatgacttttatttacgtaatattcaacataactcggactgtgcgtcaacctttatgcacgctagctacgcgatataaatgggggatggtctagctcgatcggggcgaaccttcggaagtcggaccttacttctcgtctgagatccggtactgtgtaatccagtgcgaatccgaatcgggctcataactatcgactaagccgtatccgtaaaggtatatatcttttccccttgctccaccacccgcttttccctcaatttccgtcctatcatcgtcccatcaacgaagccgtttcactgaccatgtcagatttactttctggggcctccgtcatggagaccgcggcggaagtaattctgcgacctgtccctcccctcatccagataaatggtacgcgttatgtatccaactcatctgaggtcatctcgttacggtttttccatgaatggcagagctttaaacaggatgttctcgaagcatccgattctttagatcttagccatcctgtgccttacacagatgatgtgtcagaaagctacgtcgttggaagcggacttggtttgaccggaaggttctccaagaatgtctatgacccagtttcgaaagtgtttgccactacttgcctctcccacttgaagttcggtgattatcagtcctctgcagggccaacggacacgagtcaagtgcctcatattactatgttcaacataatgggaccacctcgcccagcggctgtcggagaactaaagtctttctggacagttgaacttgaggactattccattcgcgaaggctatcaacggttaatcggcatccagcatcacattggtaagtccagttgtcaggtgtaacgggagcattgacagggtaagatcgtactattaacatctgaacaatgctgaatgtttgtgactatctgtattgtctattagattccactgagccgaaacgtataccatagtgttgtataggtgcagcccccatttcaagcgatggtcgaaacatcaacaaatgatgcttctgctagagtaatacaacgactacgagctcgcagagttgggcagctcagctcgcttgcgatgatccaaatgctccagcttctcggatgtcttctcgctcgagtccgagtcctcgcccaataaagccagtaagccaatctccctctcgatccgacgcttcaggacctcgtcctcaacggccatgcttccggatccgaacaattcatccatctcttccagtgtgcgacccttggtctcggagacgaggaaccacacatggaggacaccaatggtggtcaccaggccgaagaagatgaaggtaccgtaattcagaggcttcgataaagggagaagttgacagaccgaccgcgaaattgttgagctagcatcctgtcagaactgtataagacgcaatgaagtgcacatatccagttgctacttccaccaatactaacaccctcggcgcgcatactcaaagggaaaacttccgacacgacaatccacgcgacggggcctgcttctgttagtgcgtctgtcagagtccaaaaattggatttaccccgtgcgtacggaatatgcaaagttgataatgaagatccacacaaaaagaccacggcagcccagccagcccccttatggttctcgaattcgcccgagtacgcagatcggtcataaggatctagttaggatctagttaggatctaatcaagtgattaaatcgttagcaatacacccaatatatttgacccgtgaccaataaagataaaatctaaggacttcggttaaagctctaactaattatatccattattctggaatttaaccctaaacccggttacaatataaactaatatatataatcttggaactatcacaacaggtgccatggtcatataatgacgtgacacatcgctctgtccgcgggctgttagccctgcagcccccggtcgggtggcgccattgatttttgattttgtattttgtattttttggggctattttcgtctgaaactgcaattgttttggctttgtttccttttccttttatattccacgaaacgtccacgcagccgcatccaaccagatctggcaatgatcgattataaaatcttataattacttcgcagcacgcaataatacgaatagcgtggggtgatcctaggcccttggctggctgactgtgttgggggcattgctggcagtggggaatgagtgtgtttttagttgacgcctcctggctaaagatccgggcaatgtcccggatatgtatggacgtgggctcgagaccttgcccagatctttagtcggggttggggtccatggtcgatgttgatcgggtacgagattcgagatgggtttgcggcacaaggacgccaatggtgcgaactaacctacttcagcagtgtcgatccattgtctcgagactctccttgtgttctaattttacggcatttacggagtacccttgcagtactccgtaaaaaaatttagtcgccgtgccacgcatcaagaagatcataggctttcaagccatttgttatttggcactaaccttgggaggcagcacgtccccagtgttcgcatctgattgatccaatatcgtcaatatcgtcgttttgtggtaaacacgcctcagccgtgagctgagacagacaccgctaatgtctgatataattcattggcccattctactgcatggatccatagggatggggcgggttagagaatttttcgatccaacctcttaggtatataacacctttcgcttgggctacgcttggacaaccccctttttagttcaagttccctttgtcgcgcaatattttattgtcttctgtcgtccctatatttggagccgagtacccagcattacaagtgcttgaccactttttcttttctacggtggaaccctaccgacgtttataacctcgggaaattcttgcctaaccaaaagccggcgacatgggtacaccacttacagaaacagtcattatcactggtggaaatgggtgtttaggctcagagatcgccatcgagatcgcgaagaagcagcctttcgttcatctattattgacggcacgggatataaggaccgatgacgtccgcgacctgatggggaagatccgtttgatcggccctaggtcaatagaggttctcactcttgatctgaccgatctgaaatctgtggcatgtttcgccaaaaccaccgtcactcgtgttcgctccagagacattccgcctgtgaccaatctgattcactctgctgtcgctacatcttacgttatcgatgagctcacatcagacggctacgacccggtgtatcagacaaattgcctatctccatttttattgaccgtgggactgctcgaggctttccgggctggagatggtacaccaaaaggcggagcgaaggtgatcctcatcggctgttctgcgacatcttccggggaattggattacttcgaccgcgaccatggaagaaacggaaggcaaccgggaactgcgctgagtgcaaaggaagagaatattcgttttgggagcagcaagttaatggcgagtgttgcattatatgcattgagacggagcctgatttgggtaagtgaacttgatcggagtcattctctcgatttccaatgcaaactcgtacagtttactaataaatctaattatagaccggtcatatatcgcttgacatcttcacactggatccaggaggcatcactggccagagtaatctgcggaccggggcgcctatgtcggtcagagtcgcacaccagactcggtccgggcttcggccattcctgcgtatggtatcccgaagctccatgaacaaggccagtgttccagccaaggcaatcgccagagttgcattccacatcgacacggtggagaactggcaaaaggaacgctactttattctcgacagcgagtacgaagccgcatccgtcttgccgagcctgcgtgatggggaaaaagtgaacaaattattaatacagatgatgcaaatgatagaggtggaaacaaaggaggtgaattctcctcctattccacctcaattaagcgtcatcccgcctcctacgctttcactgtgaagggacggacaacacatttttagcattgggggaatactttttttttatatgaaattagcgaagcgaactggcacagccaaagcatttaatctgttatttaatctgttctttaatctgttatttacttcaattatttctagatcatgttataaactgcctataacaggtggaaaccaggtacaattccgacgatgatcgcaagcggatgaccggatttggtgaagaccgcgacagctgcgaggccttcgatcacctcaccaccaggtcttccgaggtcctttcgcttctgttctgttcattttttgatatttcaatccttccgactttctttttctttcatttaagccttccaagtctggcctttaaaatcggggttgtcagaaggtctccggccgctacatcagttcttggcccccgacataagcgccccaacggcttatgacagcgcccgcagtgatgaaccgacacgtcctcgaaaagggccactctgcttaccccaggggctcggcattttcaatctcaccgaacaggtaagccaaaccacctagtccgatctaagtggcccctttcccattgtccaagcgttcagccctgtcgtcatgccagatcatgaagcttgagatcgagactgactagtatgcgcctccaggttccagcctcgctcgcaacctgcccttcggagacgccggcagctcatccagcgcctctgcctccttggcggtgtgtcaatagtgctcttcctcttgatcttcccatcctggcgcgccgccatccttcccaccatctcgcttggccttatctcctaccccggagatctacacctacagacggtccgctactatgatttatcggaagtgcaagggacggagaagggctgggaacgcggagagcgtgtcctgatgtgcaccccgctccgagatgcctcgtcgcacctcccgatgtttttctcgcaccttcgaaacctcacatacccccaccatctaattgatctggcattcctggtatcggactcccgggatgataccctaggcatgctgtcgcgtatgttggaggaaacccaaaatgccacggatccgaaaatgccctttggagaaatctccgtgatccagaaggatttcggacagaaagtgcaacaggacgtggaaagtcgacacggattcgaggcgcaggccagccgacgaaagctgatggcgcaggcgaggaattggttgctgagtgcaacgcttcgcccaacgcacagctgggtctactggagagatgcggatgtggagactgctccgttcacaatcattgaagatctaatgcggcacaacaaggatgttacggtacccagtgagtggtgaatattgcttgggttttgtgatctagactaattggcctcgtctgtagatgtctggcgcccgcttccggattggcttggcggagagcagccttacgatctgaactcctggcaagaatctgagactgccttggcgcttgcagataccttggacgaagacgctgtcatcgtggaaggatacgccgagtacgctacatggagaccccaccttgcctacctccgcgatccttacggcgatccagatatggagatggagctggacgggatcggaggtgtcagtatcctggccaaggcacgggttttccgtgctggtgtgcacttcccagcatttagtttcgagaagcatgccgagacggaagggtttggcaaggtaagacagcaatcaacgaggtgggagttataattgctaattttgcttagatggctaaacggatgaagttctcggtgattggactgccacactatactatctggcatctctacgagcccagcgtcgatgacctgcggcatatggagcaaatggaggtagagcgactggctcgcgaaaaagaagaacaagagcgagccgagcaaaaagatagcactcagtccgagtccgtaggtaacgatcacactgtgaaagggggagaagtacaaggctctgctgaaggcccggctagccagcccgtgaaagacgccatggattctactgagggtcatttgaaagctcaagctgagacagtcgaccaagccgagaaggtcgaagtagtcgagaaagcaaatccatgatcctcgactggctttccttcaccgcttctttgatccagccggctggattacgcattgcattctcacatgcgacttgaatgtctcatctccctgggaagactatttgtctgtttagattagggcatatttatgcccaagctctgcaagtgtaggagctttgcttttcattcttgttctgtttcttgcacatgtcttttatatctttgggggacatttctctttccacggcgtcaaaatggaatatagtggttggcgtgttatggagatcaataatttgaccattcaagagcaacacatacaagaattgtacgcgtatgtggtctctattctagactaagatgatataaagaacgttttatttaagattatcctacgttttctgtttaggttactacctatgggaacttgttccccgaggatatagcgtccttacaaggtcatcccctcttttagcgcgtcgtactgcattcctcaaattatctcgaacgaataacacgacatctgttaccggagagtcctatattaatggcacaactatgactactacacagctagatctacccttcgacaaggttgttggccgtcctcctcaccaacccctggagaaagacttagtgataccagagcaagagctgagaagttttgccgaggatatctggagtgagcagagtctcatataagtcgtttcgatcctgatatgttcgttggccaccaagcagcagacatcatggaagacgatgttatactcacgaaggacgtgttggttcgaaagatttctggggaggtgcgtggctgctcgagactcaagccagggtcttataatattcgggcttaattgctgatgtctcacgtgtttatgctgatgactattctatttgtaacgttacttgactatcgtgggcctctgtatgatcatattgctactttgtctgggccatctttctcccttccttcggatctgattcgctcccgggtgccccgctgcggcagatacaccccatattgttgggtgcagaatagggggcggtacagggcagcgggcggtcaagcggcaactcgccgtccaaagttacgggtggaaaggcggccgtttctgacgccagaagctgtcattttcggcgtcgatttcacaggtccccatattctatgtgtaatatgtggttatttgattggtgtaacaatataaccaacataaacaattccccagggctcaaatgaagacattcggatgaagccgaatacttcttaggcggtggtccgtgtgtctccacttcgcgtcaacgcgtccgaagtcgatgcggcatttccccgattctcactcgtcttcgacttgcatactctatgcacattgtaagcctgcaatgtctactcaagcctcgagcagtattcttttcacccactttcgcccccaggaaggcttccggttgctagagctgaccccggagctggaagaactactgacatcgaaagatgcacctgtgtaagttgacgcaatgaacaggagtccaagcagaccagaagcaaattgctcgctgccatgtccgaaataaacccagattggcagcccttgactaactcacgacacccagactcgaactcaagtcgccctctacagctctcgcacaagcagtagtcgaccccaccgccaacgactacgtcaacctatgcacaccaacgcaaacctaccgcatccgccaagtccaatcctcaaactctctacacatcctccgcccaagccacggcgagatctcccaagcagacatcaaagtcgttgaagaagaagccggcgaaagcggcgcattgaacctcccagatgaagctgtaacggccgttgcgaagtgttcctcgacactggaactgcacatcccgccgggaggattctcagccatcccgttcctagagaagagtctgcggctgtatgaccggcgcagcgacgatgacggggacatagcgatgggcggttctgctgactccacaagcccgctggggttcaaggagatgcgcactgtcagggagaatgtgtgtcaggatatccctgtgtcaacggcacagtgcgaacagggctggatgcagctttgtgcgtttgtggatggggccgaggaggtggcgtgttggcggccctctgcgcggtctcgattgactgtttggaagcggttagtcgagggcgctgttttgcagggtattgatcttgagaagcagtttctcgttggggacttgtggaagtctgttttggatgatgaggaggaaatggagccgccgttcccacgtggattgctggaagctgttgtgaggcgcatctgcatcgcagatgagcggccgcctttggcggatgatatcaaatgtgagttgaaatagatgatgggatgttgtaggtatcgggatggctaatgattgtgttgttctttaggggcaagctttgataagattgaatgtacgcaatgggttggcgagacatacttggctgctgccgctccgactgtgtcgtctgctattggaagaagtgaattccttcgcgcatggaaggactgtctgcctgagacatggagaagagaggcagccctgtcaaaactgccggtaacttgaccttttcctaaatgagctgcatcgcaatagctgatttggactacagaatggctgctacaacagtcctgaccctacgactatctgcttcgttgaaccctcgcaacggcagccaaccaacaaaaccgcctctgcaccagccacagccgcgaaagctaagaataccagaaattggcatgaactactcaaaggccaccgttgattgcaaaaaaaaaaaccactgacgcacttgctgcgtaaaatgccatggcatctaatctatgatgcgcgcatcacgatcatatctgccgcccaaactcgccccgatctcggacttccaaaaaaggaaatgggaagaatcacgagcaaacgaagaaacaaatctcgaaatgatgctccaatgaatgaataattagcaccaagtgtacttctcattcaaccaccactccacgtccttgcccaatccttccccctcgccggtccagcgtaaactggcgatgctttccttttcgcggtgcacgagctcagccttcgggtccaccaaagccacagccttctgcaagagggaagtagggttccagaattcaaccttgctcatgttccactcgtgcgcctcttgttgtgctcgctggaggatagcagccatagcttggacagtggcctgctcctccgccggagacgtgggctcatcatacagccaccgaagaatatagaggacgttatcctcgggcacctcgccgaagttccgattccaagcgcaatacacgcgggcctggtcatcaccagcgcccttgactacaggtggagagcgtttgggaaacaagttctcagcataaaactcctctcgagcccaatgccacaaatagtggtcaaagttaggcaaaatggcaatcttagcaccactcgtcttctgcgacgccaggcgcatctgctcgcacagcttggcaagcacagtctcactgcacaaacacttctgaacatcctcggcaaatagattccttgtaacagccttctccggctgacctgcagtagccggtaaagaaatatgggaagatgagaacggccgccacccaaactgagcgtaaaaattcttcccgatatccgagaaaagcaccgtaaagagcgacttccgccgtggctctttctccatctcccacgtctcgagtttagtgcttagctcttctagcatccgctttgcgtaccccttcccgcggaaagcaggccgacagtagacactccccacgccgtgcgtggaaaccttctctgtctggccgtcgtgtgcgagcagcgctgtcttccggtacgactcgcacgagctgagaattgtgcgctcgtcctcgggctcgttgcggtccactaggatccagcaggttaggccgtcgcgcgtcagccgttgttggaggagatggttctcgcgttctatgtatgtttccacatccagtggccctttccaggcaacgctgttcagcttaattgaggcaatgcgttctgaggctgtggctggagccaggatcagatctggggaatcccctgtggggagggcggggatctctgcggcaatcatgttgaattgagcagagttgaagtatgagttattgaagctaggaatatggtagagaaaggacaacccaagggcaagtgcaaaagaatatataataacgagaaatccggggttaaagtcaaaagttaaagatgttccgaagacaaaaaaaaacaaaacccagaagtttggaagattccccgtggaccgacgggggtccgatgccataatatactggtcatttcgaacttccacaaatagtcacacgaacatagtaggttcttccgatctggatcactacaattggaccacacccaatccatgcctcctctgccccctcaccttgcattccacatcatgatccgggccggatctgcctgccctatgcgtacaaagtaaaaaaaagacgcacaccgtgtttctctttgtcactggcccgaagcaaagcgatggcaagcgatggaggttgcattgcgttagcccttataggcccttgacgtaagagccagtcttttgcctttcgcggagggttttgacgggtcatgtgagccttggcaattatgtcattgtatttatttactcggacgcaacctgtggtgttgaacttcattttatattgcaagtttgagttctatatatcatatgcaatgaagctttgaactatgtatgtggcggaactggacgtcacgcgatcatctttatacatgcggaaaaagatcccgattagtgtctctcctgacagtgatcagatagttagttgcactccaatgcttgctcagtctcaccttgggactgtagctcactccctcttgactttcatcacacaagtcgataatggtttctcgggaatagacaaagcacaagagaatagctccctacagttcgctttcagcagcgtctatttatctaggctggatgactacggaatatggttagcacagttacatacagcatacctaggtagtcacccgaaggcctaccagcctattttcatcggccagatccaggaaattaaacagaaaagcggcaaagatagacggagcaggtgggatgtaaatcaaatgacacgaaccgagaaccgaaatcagataaatatttgcgacacaaaagacaatatggcattatggacgttcgttttgaatggaataattctcacgggttcatcagcataagagcaaacacggaaaataacaaaaaccataacataacgagacgacattgggaactatttcctagtatagttgaattggctagagaagagaatcatgtagttgatttcaacaaaggagacgaatgagatacaacggtaaaatgggagatggtatgggaaaaaaagccggaccgcagcaaaaaaagatcagagagtagaaaaaacccgggtccagcaagatgcaaagtgaagtagacggaaagctataagaaagccagtaggaaatagaaaaggaaggatggagaaggagcgtcatgaatgtgagaatgggaagagcataggaagaagaatgagctcttgggaatgaagtatcaaaaaggaaagatatgaacctggtctatgtaataaatgccatgtgactcccaaaaggcgtccgctcccccgttttatatatttgcgccacttgcggacggcaattccagagtttccttcgtccatcatgtttttttcgatcgttggtcacgctaaatcaagaatgagatagaatttgggcgtggacaaggggataaaaaaagaaaaaggggaaataggggaagagaaaagaatagaaacaaatagacatgaatgccccccaaggcctgaaataggatcggagaatgtcgagtcatggtggctattccgagtccaccggttcgttaaatttctgtcgtgcttcttctacccacaactccaaccgaagctcaccggcttcaacacgtcgtacaggtactgttttggcacggccattcgagaccttggggggcgattgctggggattgccgttccgctgtttagagacggaaaatggcgcagtgcacgatcttaggtgcaccttgcccggttcggccacaatccaagtttgttcttccttggtggtccccgcaggtggtaaagcatcttcccgcacttcaatgcagacagtgaaactgaactcgtcatcgcggggaagcggagtcaaccgggcacaggctgacgcgagtctcgctagacatgcccgaaattgtgcctcgaggtcaaccgaggttggtgcgggcccccggtctgagacaggggcacccgaattagatggatcttcggttcggtcttcaaatgtagtattcacctctcccggaggcgcacgcgggaagcccgacagatcaaaggcgtatcgttcgaggggctgacttgtgcgaagagatgaaataatgatactgactgcggtgattgtgcccttgagaatctccgtcccgactgcgattgaagcatcgttgatgtagtcacagacttttgggtgacgggattgtcggacgggatagttgtatgcccgcacggggaggaatgttgcgcgcggatagacggagcgcagaaataggatttgatggacggagacggtgaggaaattggtgaaggaagccgctaacgctgattggtttgtgggcagcgacttggtagcagggaccggagcggagaaagtggtcatggtggtggtggtactactgctctcactggcaatcggcattgccgtcgaacgcgcggtgagggtggtcttgacgaggtcttgatgaatctgaatgatgttccaccctaaagctaatcatcgctctacctttctaagccatcggtcaatgtcaggttcaataacttccaggtggtgtttatgttttggaatcggtcaaagttttttgagttccccgatactccggccagcacgggtcaaccgtcacgatgatccgcaggataaaatggctgatgagatcagggggaatagagcgacagaattgcagtcacccggggtggcatggaataaggtctatggggggaaagaaagatggttgggtatatagtgcgttggagggggttgtttgtgttgcaaaggaaatccgaaacgtacgcttaggtgaacaaaacaacaagtagacacaagcctcaaagcatgagggatagaaaaacaatataagtcccaagcgacgatcccaagtggaagagcttgatcactctttttttagatttaagaacccttggggaggggaattcggagaggggttttaagaagcgaaaggaggggaagttttgagagacggtaaccctcgagggaatatttaagggaaaaagaaaaaggaaggctggacctaagtaggaaaataatgaggaaataagaagttatagggatgaatcgatgggatgtagctctctcttgctcatcgaggggaaaagcagaagaaaggcggacaaggcgaagtcggaagggtcacggttgatgtcacgtggattcgtcatgggtttacagaattccatttcaaccacgatttacttcgctttttgctctatattgtttggttttgtatattaaaatctttctcgttttttggtgctttttttgatatagctaacattttatatagcaagttagcatggcagatatgtgctaaaattgacgtggaaaaagtagacacagaaacagagaaagaaaaatacagtagcatagtgtgcagtgtacagtgttcagtatacaattttcagcatttatgcctatatttgtacaatattccacggagaaaacaagagcatacaagatacagtttttttttttgcctctctttttcttccccactgtccactgtgaggtggataggtactctataagaggggcgatcgtcggcgaaagaagggcaccaagagagactatggaaatactagtgtacggagcacctaaatatataaaaaccgtttaccatgcaatcagactgaagaatcaacggagcataattcaaatgcttggttccggtaccttacctatctatggaagattacaggggattttatataaacctatattacctataacatagaatatgactacgttcgagtataggttacatgttcacacttcttacatagtctactttgtacatcatacatcgatgtactttgtacatgctattagggaactaccgggggtatcagtgaggtaccgggtacattgcactgcgtcatacgcctacccactgtctccagtcgcccgatgatcttcttacactgacggcagtggcggtcataagaccaggcactttcccggggaaaatgtcatttttgctttgtcatttgtgtgttcttgaaaagccatgcagaggtatccttcctgtacgagactatcaatatcttccatctgtttctacaatttccgtgtacctctagcctttatggagcttttcaagaggggtatatgtacataagtacggtatactagactctctagggctacactatatgacaggtactacaggcatacccacccagtcgcccttcattctatctagtctgaattctacggagtattccccgacccgtgtaaccgtgtgactttcaaatcatagtttctccaaaatgacaccgagtcagtttagtggaaccccatgttctccgaacgaccatgacccaatagaatcgactaaaaagatcagaacttgcaccttaacgaagctggagccggttcagcccggaccagtgacccagctgcgtatggcacaggtcctgaaatggtaatcggtaaaccactacggagtatcgaccctcaatggtccatgtccacttgatgtttgatcgaccccggaggaggtctgatctctggaggttcctggcatcagaccattccgggggaccgtgtgacctatttggagacgctattggagagtatatggagcctgtagtctaaattaaacgttgaaaccccgaagttctctcactgtccaacgtgccctataatgtccgtttagccctctgctagcaaggtagtaagggacaaaaatagctagaatgaagctttggagactgccccttgccaataaatccctgtcttcccacgctcaatttcatttaaccttggtgcttgacatagttatttttctggctgccagtgcacactggaatgatatcccgcttcccattcggccatagctaatttcggaggttaggcatttgcttgggtttatttttagtcggtaatgaaggtgtccactgtgaattagcccacctatgtacctatgtagttatgttgtaggcacataattaataatgcaaccgagaatcggagagaactacggagtaagaaatgaacagttgtgtctattgagctataccgaagttgggcttatccccatatcttagacacgcttgatgtactcctacagcttgatctcttaggacttgaaacttgaagtagtcttatattatgtaggctggtgtgtatggatgtagaaacatgatgatctacaaaagagtgatcggccgggtatgcggcctctgcccttgacaaagcaagtctttaataatatcctgatgtattggctcaggatgataatgatcagcaatagtgccaccaacaatgggatcaatagtacggagtagatcactctactatgtacactatacgaaggcagtaaaatgtactgtatagccagggactcaaggacacgggtatagtcatgtaaagaatggtacccgtagatgtctttaataataatccaattggcaggagcttcaataacacacagcaaataaagaagaagtggaatattaaaatcggggcgatatagagccgaccgccttcaaattgcccctcctccgcgtctatttatctgccgacgcaaaacattggattctcaatattgcgtgactgatactcattggcttcgaggccttcattcatctctcttctgaatcttgcttgactgacccgcgaacccaaatagcctcattaattatacttcgttcgccatggagcaagaactcctgtcgctcctggcagacacccagtcgcccaaggccgataccaggagagcggcagagtcacagctggaaagcctttatgtccatgattccttcgctatctcactcacagcaatcgcttcgcatgagtcagttccggtcaacctgcgccagtctgccctctcagtattacgtaccttcattgccgccgcttggtctccaattctcgatgaattcaaaggacaaatcctcatcaacgatgcgaacaaatccagcgttcgccaggcactattggtcctcgcgacaaatgataaccctcagcgcaaggtgaaaaactccgcaagtttcgctgtcagcaagatcgccagtgccgatttcccggacgactggcccgagctgctcccttcactgctcagtatcatcaataactccgccagtaccgatggccagatgcatggtgcattgaaggttctcttagatcttgtcgatacagggttcagtgaggagcagtttttcaacgtcgcccgtgatctcgtttcgtccctttttgctgtagctaccgctgagtccaggcggccaatgctgcgcgctctggctgttgcagtcttccgctcctgcttcgatacattggaaatggtgctggaacaacacaagacggccattaagcaattcatggatgaggtactcagtggatggtcgccgttcttcgacacggctttaaaggcacccctaccgcagccacccaacgaggaagaggagcataaacaaggggagattgcatcgcagtggaggggaattgttgggttaaagttgcaagtcgtcaaggtatgcggtgcttcttcttggttttgccgggctttcgctgacatggttttttttttttcatagactcttatgaaaatccgcatggtgttccctgctcttttgactgcacaaagccccattttcttctcaacagtctggacagaactcaccaacgcgttgccgatctaccagaatttctacattgaggataacagacagagtcgtttggaggatgcggacggacttccccactcactcgatttcctcgttttggaggagcttgatataatccaggcccttttgaaggcacccccagtaaaggcagagctgcagcagcaacttcaaaatgccggtgcgactgccagcacgtccagctggcttccggagattatgaagctcgccagttcctatgcacagattacaacagaggaggaggctctatgggagattgatgtcaaccttttcctttcggaggagacttctgtcacggccaactacacccctcgaacttgcagcggagatctagcgattaaggctggtgaatggctgaagggtacagctgccgagggtctcctgggctacatgaacaccgtctttgctgattcgtctgtctcgtgagtatcactctgtatatctgctgtgaattatattgaccatgatgcaaatagatggaaatcacgggaagcttccctgtatattctcaactgtctgcttcgagacttcggtgaagtcgatcaagagatctcacctgagctggcatctcacttcactcaattcgtgcaatatgcgacccaacaagaacaggagctcttgcgcgctcggggctaccttgtggctggcgctttgtccaaggtcgccggcaaggcattccaacagaccacatcatcctatttggaggctactttgaaggcgatcgccgaagaccccgccgaagtggtccaagtggcctgcatccgggtgttacaagatctgatgcccgctctgccgaagggcttggcccgccccttccagcctgctgtgattgcggccatttcagaattcatatctgcacacgaccttcgtgaacagactgactccgatgatcttaaggttacgttggcggaaactctccgggacactattatggccgattctagtgtggttctatcatctcctgccatcgacgtgttgttcaacattgctagtagcggagccgaaaacttccaattgaccttgaccgtcacagaggcatttgaagatattgtggaccaaattaccgatagtggccccgattcttacatgcgtctttgcgagaaggtgcttccctcgttgatgggcgcgattgatgtgggcaatctgactgaagagaatgctttgacaaacttcgcagccgatcttcttcgcgctctagccgagcggagtcctgagcccatgcccgctggtttcgtggagacggtgatgcccaagttgaatcgcctgctgctgaactctgatgaagccgaattaatccggcccgccacagaggccgtacggcacatgctctctcacgactttgcgcagttcattgcctggcgtgatcctcaatctggaaaggaagcacttgaagttgttttggtcatcattgaccgcctgctgggcccagccgtggatgacaatgcagccacagaggtcggccagctagcagcagaattggttgaaagggccggctccgagcgcctcggtccttaccttccgcagctcctacaggccgtggcacagcgattggcgacagcacagcaagcgcaattcatccaaagtctcattctcgtcttcgcgcgactcactctcatcagcgcacacgaggtagtcgacttcctggcccaggtcaacctaggcggccagagcggactcaccgtggtgctgagcaagtggcttgagaactccgtcaacttcgccggctatgacgagattaaacagaacatcttcgccctggcacgtctatacgagcttgccgacccacgtgtggccgaagtacccgtcaaaggcgacctcatcatccaggataccggccgaatcaagacccgctcgcaggcccgcaaaaacccagaccaattcacaacagtgcccgcaccactgaagattatcaaagttctggtcgaagaactgggtgcagcatccggaaataaggaaatcgatgctgccgctgcggccctggatgacgccgacagcgacgacgatgacgacgactgggaggatctccccagccaggtcctggacctcggcattggagccacgaaacaggggctgctgaatttcggcgagggcggctccgagagtgtttttggtgtgcgtcgccgagacgatgaaacgcagggcttcctggtggatttcttccgacaggcctccacgcagcctggtttccaagaattatatgcagcgctgactccggatgagcaagctaagctgcagagtctgtgagtgcagctggctgtggttgcgagtccccttccccgagccccgggttattaatggtttgatgcatggatgcccataaaacatacaaggacttgtatctgtcgcttgtacagagtaaacataccttttttatttattttagttgcttgctacttgctccgtactgtagaatgagcattagcagatccttgtggtatggatcctggtagtttccggtctaggccgaactggagcgatccacaaatgccagttctttgtttgcacccctgtactccggactccgtagtccgtacaccgtatgcccatctgcaacattgtgttttgttgattaacttcaggctagaggcctagccatttgaagtctatgacaagagataatgataggtaatttggagtggtataatttcatagttatatggctagttaggctccttctataacccgaagcaaaaagtacataagtatagaaaattgaagcgacgagtcagaacatccctgtctctgcatatgccattccttccagtcggaaccactcagggattatccgtcccgtgtggggatgtaccagacagccgggtccaagaggtccaagatcaggggtgatccttgctttgagtttggcctttcctttttgcctttttctttttgcttcttctggcgaatattcctttcatctgtcccagggttcccagctgagttgggcactcatactcttacaacacctctcggcttcctcttctgagttagtgcttaccttttaccgcttcgttgtcaaacggagcacgccattacctgtagggatccacctgggcagcagggtctcggagttaaatttagccatactactccgtactccgtaagtagctacaacatacaaagaaaggaagggaaaccaaaaatagatgatgaatatccaacatctccggataaatcatttcatatccatcatcaaaattgcaacaatcaaggatctcttcaaagaatctactgttataaggcgataaagagagggtttcaagatttcgatatcgaattcccgggatactctatacattcacatatataacgcccaatccactgggattgttttctgttaataattgaagagaaatgaacttcactaactactatgggaatagtcggctgcttatgcggccttctcaagtcttcttaggtagtatttttaaatgtcgtttttgcccttctcgattttacagctagatggctgagaaaggtcgaaaaaattgtctgtttctatgtacaacccactttgtctcacaatgttttcaatgagaattgactttacgctactgctcgcggtgactggctcttctgactaccaatctggccaaactcagcagcggtcctcggcctgaattagtttacgggtttattactccgatctagctttcactctacgaaggctccattgctctttccttcaagctgaggttaagaaggcgaagacgataccccaaaaaagacatgcccaggtcgcataagcgatcgactactcttcctcgcctttatagtttcccggatttaggaatgcatatcaccgcccaattcttgaatgctcaacctatcaagccataatgagactcactactagtagccaaaacaaagtagattcatacctgaataaatacgtatcattagcaagtgtcgggaaaatgttgaacattgattttcttctagagcatggtccattcatgctatggacagactagatttgcaatactaattaaagatcactttcatgccatgggtttagctagaatagaagtgacttacatccaatctatccctaaaaagcttcgatgtcttgcttatgtcttcgcaaactagactgacgtcgtttctgaatgcttgatcaaaaccgaccggcagttgtcatgaaataaaagtgccttaaataacgggcttattgctgacgattctataccaagggccgagattttcggtgttactgtcgctttcaatattgaaagctaattcaagagcctagtcaaacttggttacagcaatatctgacaactggatcctgtttggagcccgatgcactaatctagtctggtgagaacactcaatgtagaacttagatttgcatactcggtatcttgctgtccagggagaacgatggctaattttacattcccaagataggcagtgatgggtaccttccgtggggctatacatgatgtggctaatatatccggaggcctgtgatttgaggatcgggagcaaagatatgatcagtactagtcagaactgaggtgttcgatcgatcgggacagatgatgatcctaggaacgatacctgatctctgcaggggacctttctccgctttcacacatctggcagaacctgatttccctccctgtagcgatcatcttgtcaacatatgacgtctcacgcagggcataaactttttggtactaagtaagaatgccacattgagaactcaatgcctggaaactcttggtcatggcctgttatcacatattagagaattgtctagctgatcacagtactagtatgttgggttatcgtgggccgctatgagactgtcttggaaggaagacccagcacagtgggccagcagtaccctaatcctagttaaccagggttgagatcccgagaattgtaaccctggaagttggaaccttggaaatgttaaaaaatcgaaaatcgaaaatctaaatttcgggtcagaccgatttggaatgggcgactttcccgtaccaggctgtcggatttcccacctgcggggtcaacaaaagcaaaggtacggaaccggccaggtggtagaaaaaaacacagtggctacgctagggttctccccggtatcctctctctcgggttccttttcttggttagaattgatagcttcatttcacttcccccccctcctccactttctctcttcatagcgaaaaaaaataacttccctctctctttcctacctttcctcctcctaatccctctccctcctcctttctgtctcgccatgtcacaacccaatctcaacgaacgcatccaagtcgacgtaagtagatcattccctctcatttgttcaatctcattcctaccccatatccctataccttccagaaccccaaaaaaggtcacccttgggcccctttactaagctcacaaccccgattcccaaacttcctacaatctccaataacacccccaaccgccactaacaaccccccagacaagcgatgatgactctctcttcgacatcgaatccctctcaggctcaaacctttcattggcatcctccgtccgagactacagctacgaaaatggccgccgctaccacgcctaccgcaacggccaataccccttcccaaacgacgaagaagaacaagaccgcctagcattaacgcaccacctcttcaaactgctcacaggcggcaatctgcaccgcgcaccaatacaagactccgacccgcgccgcattctagacatcggcactgggcccggcgaatgggccctggaaatggccgaagactacccgcgggcggacatcatcggcaccgatctcagccccatccagccgaactgggtgccgcccaattgccgcttctatatcgacgacgcggagagtgattggactttctcgcccggtgaggcgttcgactatatccatgcaagaactatggcgggcgggattgaggattggccgaggctgctcaagcaggcttaccagcatcttaagccgggcggctggtttgaagcgcaggagttcgagcattgtgtgcgctccgatgatgggacccatgagcgcgctattgctattaatagctgggcggaattgttgacccaggctagtaagaagtttgggaagccgatggatgttgcatcgagcatttcggagtggatgactgaggaggggtttgcaaatgttactgatgatatttataaggtatggtcccctttttttcccccgggtgttgtttcgcatactgacttgctttcagagtcctgtcggtggctgggccaagaatcgccgctacaaagagatcggtcgcatcggcaaggtgtctattatggagaccattgagccgtactcactggctctctttacccgtgtcctgggtctctcgtaccaggatgcacaggagcatatggaaaaggcgcgcgcggagttgatgagcggttcgcaccacctctatgtgcgcttccactttgtctacggccagcggcctttcgacgatgaacccactcatcccgaggctccctgaggcttggggctgtggcaacaatgattatcaatgagacactacgacctaaaattaggattgagaatacttctatccctatcgacctctcgatctctggcaacatgcttgatgactatatttctgcccactaatgtacgaaggttctatgtactatattgtttgttccacttatgttcatattcatgtggacatggatatcgtgaagcatccgggagttgatgtggtgcggtgattatgtcccagacggtcccaccatgacttcacttgcccggtatcggccagcgacccgggctatatgaccgacatatccaagtgggggtttcaaatactcagctccgaacttgacccgggccacttgatttcaaggcattcggaatatgcacacacaactgacctaggcctgcgaccgggctcgggttgagggtgcgcttacgccgccgcaagccgcccagtcccgatcccgagaacctgacacacacccgagacagcttcctccggtgaagggcttgtccgcaagacctgaatcacctgaggtaaacgttgctcgtcacagctgccaattgtttccagcaggatctctagcagttcctgtttcccctcgcccttccatgagcttggcatcgagttcatgatggttgttggtgaaggacggtcctgggaatcagggccggcatggcttaaggtatcgtctgccaagtgtgtcggtgcgggtggggagaagggcgcagctgcataggtgttgatgtttgtgttggcagtgatgttggtgaaggggatagtagaataatgagacggggtttggtatatatgcgtttgcgggaattggttcggactcggattcggattcccgtatgcatcttgcccccaatgatgaaacgcatgaggcctgtcatattcatttcgtattgagtattcttccccgtaatgtggtactgttgatgtgagtatgggtgcgggatatccagtgtgttgtaagtatggtagtgcttctccgtcaagcatgtaattatcgctattgactccatatatcgacgggtagtgcatccctaacattgcatcctgcgcgtgtaacgcgtgcactgggagaccctgcatcggtactgagacggttccggtcatggcccccggagggtaggtcacgcctcctgtataacaatcgaacattgtcgtatcttctacagtatctgcctagagttagcataggcgccaaaaagaagtgaaacaagcaaaacatacttctacaagcaaggggttgaactgtaggcccatctagctccgcaatttgcggcggataccccgtcgcgataggataagccgaagtagaagtcgaccgcgacgaagcggatgtcgacctagtcccattctcactccccgtactatcaggactcgtcacagtcatggagttcgtgatgatcgatgacgctggcgatgacccgcgccagctaccttcaccagtatccggggtacctccagccgaagcagaaccagcgccattgccatggccatggccatgaccatggttgtcgtagttgtgcgcaggcgcatgaggcccagccccttggcccgggcgctcgtgctggctctgggtatcacccggctctcgtgaaccccggttcaggcgctcccgcagctgtgaaacttcgcgtcgtagttggtttattatctcagattggctgatatgggcccgatcttcagccgttgttaggtaggtacattctgcttcgagaccgcggattatgcaggcgtggcatgggacggagcggtcgcactggtgataagagaaagtggttagtggcttgggaattaattaagaatccatgggtgtgagtagagataggaacagaggatccgggtaccttcactttgcgctcgcgacatctgaggcacgactgctgcgggcgtatctttgtcttggagtcgggcattgcggcaatgccactctacggtattgcaactccgtgcggtgaagatcaatccctcagagattcggagaatttgttgaagttgggttccactcaaagggtcccagttctccatgcagggtcagtcagctgttgccccgtattccagggaaatgtgatggatcgtatttcagatccatatttttctctctatgttttcctctgcactctgattgggtgcagttcgcaatcgcaattttcttctgaaggtaatcaagagatcggtaccttcgaggagctcttttgttgtatgcagagctatgctacttcatctgcaatgatcgaagtcgatatatgctactttattgaatatgttctatgttgatgttaccgtcgcaacgcttatcacgtcccccgcgattgccgtagatcgcagttcatggaaatacgacgtcggtgtggggaatccttgaaagggacctcgggacctcgggggctagtgagttagtgaaggaagtgaggcaatgagacagtgagctagtgagctactgagctactgaaggaagtggaccacgtgcgcgaagggagtatagggagtatgtgctacataccatcaaaccatagtcattacatcctttcccgtttcgcctatacttccctattgcgaagataacatgaagcccttcccgcccataagctggctaacccggagcatggcctcctgctgttcccactgctaccagtgcaagcctcgatagagaacccagtcttcgcccgagcacccagatggggtccaacaattgggtgtttcgagtgcaatctgaatgagacgcttgtcagcgaaacagcacaagcaatactgagccgcggcctcctccgataaaaagtatcatcattcatacattccgctctgtacattctgccctatacacaagataaccaaatccatcgttaaatacatacaaacaacaatttcaaactttcgaaagaaaccttgaaatgtctacccctgcaaagaaaatccaaccccctccccagtccccatctcaacaagattagccctcatcttctcaggcctctccccaagtccaaaagcagcatcatcacgacgaacccaagccccaaccccatgctgcagtaccgcagtagccctaaccttcttcttctcctcggcatcatcacccccatcctcactgtcagaagccttcaatccaagacttccatgcaaagtcagcctggtctcaaccccaccctcactctttccccgataaattccacgatgcaagatattactattataaaacactgcatctccaggctgcaattgaacaaccaattgatccggcaactcagccgcataaggatccgcatcacgctcgacctgcgtgcgtgcgcgtgcatgcgtccccggcacaacaatcagcgatgcatcggggcacagcgccaagttgtactggcaatgcgactgacggccgccaggcgccttagccgcaagctgggcaagttcttcctcggcggtggcgtgttcggagatatcgtcgcggtgccagcggagctcgaagtctttagtttcgggcgccacgagcagattgaacagttccatgacgaggggctcggtctcgctgctggcggcgttttcaacccccatgagctcctccgcgacggcgagaatcgtgggagagaaatagcatcgtgcgaagctgtcccgtcctggcatttcggggtgcattaggtgctgcacgccccagattccgccctccgaggcgggcggtacggttgtcggccagggtgggaattgttttgggacggtgcggaagtgcggccagcctccactgcgagtcatggttgtggcttttgtggcaatttcgtggtagtgcgctacctcggctggagtcaggagattgcggactaccacgaagccatcgcgtttgagggcgtctagatttggggtggacatggtaggaacgttgaaagaggaatgatttctggaattcgcaaaatatctggagatcttgaaatcaatatatatctgcgggggtggatatacacaatacgacgcaacagtgtcgcatctacttttctggggactcgatgctaccgtggatctccagatgtgacctttcccaaggttatcgttatcgatgtatatgtttttatctgctgtgtgtacatatgtagtatttgattctaataaataaacaaacaacttaacagcataacaacacaacaccataacaaactcatacattgtcttgttcctagacgtcatggggatcaacgccatggggatcaacgccaagaatagccaagagccagagggctgagtcctcccacagtgtgatgtcgcatttgatctttttctcttggattcctttgttcatacctctctagcttctgcttttttgcgatattccatattatctccttgaattccaagaaaaattcaaccttggtgcaaatttcacccccgccatgcccctccttcacgtgggctccgccctgctagtattgctcctgatactcccgcaagtacatgccttcggagctggaaatatcgcctctatctctgctgtagaaggcaagaactggcgccatggtgatatcgaagatgtcctcaagacgctggctttcatctccggtcacaaatggacctcgaccatgatcaagcgcgtgtattttggtaactggttgcgcgattagtgagttatcaaagaatccagtaaagatccaatatattcctaactgcttctgtagctcgcaggcaatggacgttggaactcttaaaaacctgcaagccgatacaatccgtgttttggtgtgggtcctctcgttcctgagcttcggttatgccacggctgaatttgaggtgactgcggagcgattgggtgtttaccgtcccgaggaacacatcgagtaagtccagcttgaggtatattgttggtgatttgtactgattgtcttcttctgcatagtaaccccaaggactatgccgataacgaagacgcacgtcaatatgacaagcggttgcgcccacccgttcgtgctattgagctcgaaatcgacccgaacaccggtatgaagaactacatcgccaatgagcgaggcgactgggccaccagcgcggcctttatcaagttcagtcttagccgcagtatccactatggacggacatacaccaatggcggacataagaagggcaacgaggaggacctgtgcgaagcactccggtgtctaggtcagggactgcacacgttggaggatttcgctgcacacaccaactacgttgagctggccttgcgcgagatgggtttcaacaacgtgtttccccatacgggtactgccactcagatcaaccttcaagggcatcacgttttcccgcttgtgacgggaacctttggtatggtcgatttcttccattccgtgatgggagaagcaaatgatcattttactcaatctgaggtcaacgagatggatattgcgctcggtgatgccgcagcaaatgcgcagtcgaacaattccctcaatgctttgactgggctcttgggcaaaatccccggtaccaaggatcttgtcagtgaggcagagagtctcaagaggtcgtcagaagcacaagaaatggccaaccggagccgtagtgctacaaccggctatgcgcagtcttccaatagtcacgagcgatcccgtgcgggcccaacgggcgatagttcgaagcctagttctgggctcaacgccatgcctgatttcaatccccaggagacagtagccaagatctatcccattctggcattccgagataaggtgatgcggagcttgaacgcaatcattgaaaagatcccaggcttggagtcactcgttgagaagatctccgagactctgaccgttgtcgtcatgtcgctcctagcgcctttcattcgacctttgatcaaagctgcttccaactccattcaaacaggatcagcaggcgtcattgatgcctctggcaagcaccagtacgaaccttggaccgatcctcactgcaccgaccccacccactccttgctctccaaggaccactttgccaacattctgaacgagcccgccggacgagtcgcctcttcaatcgtggagtacgtcgcgcctcgcgttctgtatgcttggcaacacaccgatgtccccgagagtgaagtcctcaatgattgcatgcaagtcttccaccacccagcgttgcgcaacatgcacattgatgcccatcgtgtaatgttcgagaccgtcgagaaatgggttcacagccgctcagaccgcggcgcttcccttaactccgtcctcagctccgagggcgtgagatccggccgtaatactggtggagtcagccacactcacagcgatggtcatagcgcatttgcggcattgggtggtgcctcgcacggccaaagccagagtcacaaccagagcagtaacaatggcggaaattcatctggtggattctcctcattcttcccccaacaaaaccagcaacaatcaaacagcagctcctctggcatgccctgggacaaactctccagcatccccggtttgtctggcctgagcaaattcgaaagtaaaatctccaacttcctccctggcggcttgtcacgcgatgcaaacgaccaaggaacccaacagacccaaaactcataccagggctaccaggtaggtggtgggcacgaagccatgcaaccttctccacagcagtacgaaaactaccaccagcctcagcatgtacctcaacatagtcaaggctaccagcataatcaacatcaggaacagcattatggtggctcgcagaatcatccgtcctatgtacagcaggatggccacttgggccacccgcagtcgcacaattctcacaatgctccgccatatggttcgcatccgggttcgcatccgggtccacatggtgggtttgggcagggccagggacatggacatggacatggtcatggtcatggtcatccgggttactgaggattagatgataagacgaagataaatgattgcgtgaatatgtcgagatcaagtgcagatgaattgaaatgattgtgattgtatttcatcgggtggttgtttgtgccgatttatgaggtagtggagtttggaaacacgataaaggtgaaggatttagggaacttggaagttgtactttcttttataaagcatatgaaacggacattgagtcacctgggctttctttggatttacatgagctgttgtgattccgcgcggtatcgcttagtcttaggagtccaacacgtgcggtttacctacgtatgggttcatatcaatagctcaatagctctgtttacttggtttcttgcctctatttcataaagccttggcttgtttcaatgaaatatacaggatgcagatgaccacaaatactttcaaaggctcagctgtgagttgtactgtaagttattgttcttataggaggtgagcaaagggggctgttggttcctaaagtatgcatttgatatggaaatagatgctgttagcaacgtaagattgatacaagatagactcccttatgattcgcagtgtttgagtattacaagtcccttttcggctctctggtatatttatattggctgtcttgtgaattttggctcttctatagctatatcccttgtcagatgcgtttgtcactttctctacttggctaggtattcatcattcagaaaaggtctttacatttgccgcaaggctttgttaggtattctgggccttgtccaacaaagggcagagccaactaaccctttaacaataacaatgagaatagcattcattatacgacttaacataaagaaacctttcaattcctttgacttattcttatctctcgggtctacacctggactctccggggctatataagcccttctctcctcgcgtcaacaaccggaatttgccaacattgtcctattctacacttccgaggtcggatattcaatccaataccaaataaaacccaactgtgtgagtcttgcagcccatatattatcatggcatctgacgagctttccgagcttcttcacaggtgggaacgggttgcagtactctgcgacgcaccccaggcatctgtgcagtgctatattggccgagaacacagcacttcctggataatgactgtagttaacgagtggatcaacgagaaccaccttatctggaccctatgcgccgccctcgccgattccggcctcgaccaagagtggacacgcagatttgacctctactaccgcagggagtggcatcgaattcagttgatggtgcaggtgacccagggtgctgagcggttgatgctagatattcgacccccgcctatgctgctcgctgtgtttgcccaccacaatgggtctacggcccgataccacgccatcatatccacgcctgctcgtactcgggccgacggaggccttctgaatctgttgcggcatgtatatcatggaggcatttcctcaactgatgtcttcgatgtagtcctctgtggagagggtatgactggaatcgcgccggagtcgcctccgtactctgctctcgggttgccagaccattccatcccagttttgaacctccctcctccatatgagaacactcccgggtctgaccggtcagagctcttttctgagcgctatcccactccgcctcctccctaccgcggtacttctcccgctccccctggttggactccaccatcctaatgatggcgtgtagcaggtgccttgcttgttggagggttggagcattatctgagcttatcatgagataggtagcttactctacatagaacgttttcttagttctgtctcttttatcagaatgaatacgagtggttttttttttgccaattctctatgtatacgtatagtatagtaagccatagctatgatagcgagattgaatacctttttgagcagtttatatgagaattctcaaagtttagaacattatatatctctatgcataagaaagtgcacgaactaattttgagttcaagctgtacttataggaacaaatatagggcaagaagacgaatgtcacaaactttatctgagagtatattgctttaatatccaaaaataatccaaggctatgtaggctggtcgcctatgccaaaaatagcgggatccaataatcgtgtgtagatcaagcggtgatagtatctccaacaagcaatgatcgagggtcagtggaaggcctaagtttgtcgagtgcatcaacccttgcagtgtaagactttgtttcaacggcaatggcttatcattcgataatctggggatctaaatacgtttgtccagctgattacaataactacaatgtaagtctacgtcaacattcagtcatgctcctattcttatgtgtcagtttctcgtgttcgtgtctcagttgaactttccaacatgtatatgtacagggaagaagtataagagagtcgtcaacaccatcaggatacgcttcaacagcaaacattagtccgacaaaattaaaatgaagaacatgtcaatttgcgctctcatcttggcgactgccacctccatcctcgctgcacccagcgctgtggtgcccgtcctagagccgctgcaacttacaaatctcaacgcagccatctacagcacaagccccccgcaaacctgcttcctctcttttgctgtcaaagacccaaacacgaatacagacaccaactgctccgcttactggtatgttccagtctatatcccaactttcttctctatctttaggatgccctacaagatcaaagcaaaaaggaaatgaaggatactgacttttagataggtccattggaatggctggaaataagacctacgactgctccgacaaggcataccagctccacctcccaaatggaatctatgatattgaaaacatcgatttcggagtctcccgcgcagacggctctgagactgggcggtcagttgtgactggcgacctgtggaaatgcgagaagcaggagtatcctaaggcacagtgcaagtgggatggtattttcagtctcgatgtgacttcgtctgcttgagtgagggtttgcgcgtatgtgaggagagaaggcagtattgctactagggctatatatgtggagatgctattttgcttccttgtttcagtctatttggtctaattggcatttatctcttgcgttgttgcttctaaatatactttaatctgttcttatttccgatctgagacactctgtagtgtagctggcataaatctaggaacagcctcgaaataccccgggctattcatgagaggaaaacaccaggtgaactaattaaaagtcctatatcctatatcgagaaattgaacactcagacttttatatcgttggaggtcaagtccaggccaatctggaaaaaccctgctgactcatcttacccacttcgggtgcccatgaggtcagacgcgtgaggtctcggcgctacaccaaaaaatgtggtcttgaattccgtcgatctttgcaatcaagcggattcttctgctcatagtctcgataggcttatccctgatgaaaaagcttgatgattcagcagcgattgccccctcataatgaccgataaggctcctcgacacctataaggagtagtattacgatattactttatggacgacgctacttgcccacggggcgcaaaagggcggagcgcttgcgatctatgtcgccaccgaaaggtaatatccacaatgcctgtgtgcgtccttaatctgattttgccgacagatccgctgtgatagaaatcaaccagcctgtgagaattgccatcttgcaggactaccatgtacattctctcggcctccatcccagcatcggaaaagtacccgacagtaagactctatatcattgaacccttctttaccaggcgcttacggtacgcagagagcttgccgataccaaagctcgggttcgggaattagaggccttgctcggacttaaaggatccacaaaacaaagccacaaagcgctagctatcccttctccgagcagaagctcttctccagcttcgcctagatccctctcggaagcatctttatcttatttgcccgatactcgtgattttgataccgcgttggcagctttccagtggcacatctcgtattgtgggcttgggggtgctctttcgacgcaaagggcagctttttcctctcttgttcaagagcagacaggctgtactttcaatgtggatgttttttctcatgaggtcactcaatctttcaattcacaacagctcaagtcgacaaagaaagtgattgggatcaaatggccagattctgctctagtccaacggtgtttggaatattttgatagaaatggtctctattctatatttccagttatcgatgttgaggccgtacaggttctactcaatgcaagggtcttagaccggcctccaaacatgactcgggcttcgaatcgggcttgtctagctgcttttgcggcaatgatcacccagatccaccgccatgagcgggctttcgcaggcactgacccggatgcttatttgcaagcagcgttaactctccttcctgaaatgctactggagccccctgatctacggaccttggaagcggtgacaatactagtaggttcctcgcatgtccagccccgagagtggatcccatgtcccagaagcttatatgtggccatagatgctctatatcgcccctcttggcagacctcaggcagcagagctacttcttgggattgcagtgcagcttatctataaccttggggcaaacagaatacaaacccccaatgaggtacacaggacagaccagcgtagccaacatcttcgagctctattctggcattgctatgctgtcgacaaagaattctctatccgaaaatcccaaccacccttgataaacgatgccgattgcgatctagatctgcccacgacatacgcccaggaaacctcagaacgtcacttctacatgaagcccttgtcatccaaggagcttcttttcccctcggacctccgcttttctgtgctcaagtccaagatcttccggttactttattcggtgcacagtcaaacactaccggaagctagacgcattcagcatatccgcgaactagaccaagaactgaacgacttgaacctgggttatcctgccggctgccggccggaggtgttcgccaccgagagcgcaccggactatctgtttcatgatctcactctccgcggtgtgaatatccatttggaatattactactgcctcggaaaaatccacggagcgagtagctcttgcaaggtaccttcgcagagctggtcgcctctcccatctagtgcagagctgtgctttgaagctgcaaggtgctcgctgatctacatttggcgagtccgccaattggtcaaccagcatacgttctggtaagggacttcgaaccttgtcacaggtatagatactaatccaggtctctttcgtattctaggcttcacgcgcaatttctcctcacggccgttttctcggtcttctggtatctcatcacggccccaaattcatctactttcacaagggatctcaagaccctggaggatatcgctgagctcttagctcacctcgacagatcgaccgatgacgggcagacttacccgccgttctatttggcacaggcttttgttgagaggctggtctcgcttgcacggcagtcgcggcctagggttgagggcacatgatagggttgctcaatactttcggttacttttctcttgaaggtagtagctttgtatatatacgaataaatgctattacactctgtggctttgggtttgataaacaaataaatgaagttccggcaacatgaggatttcccattcttcaaaatcttgattacaggcatctacatagcgtgctaagacctcgagctgagaatttgctcatctgagacacctcgacttccgaggttgagtcggaggttgacattcaggaaagtggagacctcgggcatattacttagcgttatctgtcaggcggtgagcctccggagtattgtaaattacctcattggcccgtcccggtactagcgcatacacggcggtatctctcgcatccgacggtgcttacgttgacagttggactaacctcaacgggaataacggcgatgcagatgaacttaaaatcttcaccgtaccccagtactccggagtgaaaagaaaagtgaaaaaaaagtcaaagcaactctctctctctcgcacaatcttctatgccactttgacgatgtaggtatctctacagtcttcatctctcctccgtccgatttataatccaaatgaagcggaaaagatcctacgataccagccaccgccactggagggctcaccgcatgacacctcaccgctgccacataatccacttgaactcgagagcctagttacccagcgcaatggttacttaccgataagcggatcagctgaaggatctgttcacacctccttatggagtacgaagtactccatccctattcccccattgcttcttgatgtggaaattatgtgggtcgacacgaccctcagcttcaacttccagccgcaaacatggatatcaggtgatcgtcgggcatgagtctcggtgagtttggttcgttaccaggcgaaccagtttcggacctatccccagaaggattaacgatggggccaaaatctgatgtagtggatcgcggtgctacgccagccactgcaccgggcaaccgggcaaccgctagatgggagcttgtgggcctcgcgccttttttctgcagagctcacacgagggttgcttcagacgatcctgtggtgatcaagtacgaagtaattgttcgaaatccaatgtgcgcttgacatccgtctgcgatacagaactattctgtatatcccgaaagagaaggaagtccttgaatcgaacacaatgactcgtgctgtaggtctcaaagctctcgaagacagcttcgattgcggcgttgccgattctcgagacccacacagatgttttgccaaaatacggagtggactattgttttttttctttttctttttcacaacatactatgtacggtcacgcttctagctctccggcatctgggcccggcaagccatttggatgatttggcaattcttagcgcagctgaaaaagtgagtcgcagctgaaaaagtgagtaggtcggaaacagaatatataaagagcccaacgcttccccttaattcttgaatcacgcctctcactcatatttgttttatgctcgatgctcttacgacaatcatgcgcggaatatctttaatcggtctgattcttttcctgcgccctcacctcgcgtacacggagaaggtcccagtgaaaagcattggtaccagcttcaccatcaatggagacaaattgacatggcctgatggtcctttcacgggaagcttgacctgcactggccccactaaggtcctcagcctgagttcttgccagcggtacggcacctgctgtcctcccggcaccacccttaagggttccccggataccgaatggcattgctgtggcaagggtcacgatgtgaccggctctaagaatgtgggctatgagtgctgtctgtggggttccaccttcgacggcaacagctgccagagagaggaggtgtgccacaacggcaagcatttgatcggtgggaaatgccagtgcccctctggtcacgaagaggctgccgatggcacttgcaagcctgcgaggtgtcaatcaggcattgaaagtggtatgtcaaccctcttaactttttttttctttctagggcaacacaattaacaaatgtgcaggcaaatgctacttcctcaagggacgatccggcaattatttgacattcaacaaccaatactccgaactcgaattgaacccctatgtcagacccagcaagttccaattctgccgaaacgaaaaatgcactcctggcctgcctatcaaccccacccacgagttctacatgaaggacctccacggcttgctgccagaagcaaccgacgccggactgtggatcgacaacacaaacaacggcggttacattggcaagacttacgactttgccaatgctggaaacttcttgattaccaagtggcccggcggcagatattgtctcactggattctccgagggactcgcgcaggcttatcctgatgtccttcctggtctcagcttcaatagccgtgccccggatgcgtgcattgaattcgagctcaccgaggtgccttgcaacatcagggatgatgcgaacaactgcatctggggaaatggtgaacggtgtggccccaagcccgtgcatcattctgtagtttaagaagatgcatctgtgtcactctttccttggttatttttacgtctaccaatgttcttcctatgcctgagttattaagttgagaggttttgtcggaattttctttctgccgtgttcgaatattgttatgctacacttgtatcttagcaatcagcgtttgtattttattttattgcatacaaatgactatgataagcatctttagtagtctatcagttcgagtaaattgaaatcttccatcagtacggaatatagtatcaaaaattgcattgccgaactccaggtatatattgcggcctagtgctattaatttccccgaaactcacaaaagcgaataaatatcacatacgaagtatcaagaaataagaaaaagtccacaagtaccagaccattattgttatattccaattaaagtatagtgcggcgcagtaacgcgcggcgaccaggttcttatacacagtaggagtattgggatggccaatttagattaacctgcgctattaaaccaagacatacataatagtgtgtatttatagatcgggtcaatatgtgctcgtagctctagacctcaaatctacaaatgtggcttcgtgtaagtaccttcgtgctatctggcttttccaccaatccctgtcgtcaaagtatacatctgctttcccctcttttcccttacatattcctattcgctttgtcttttcttcctccttctctttctcttcatcgttctctctttcatatgtgactgcaattatttgcctctaagtgacaggccacttcctaaatgaccggatactataaacctgagacactccgggttcaaccgcgacttacctggacgttgactccgattgggggaataatacgatcctagttgccctatgatacactagtttaccccaatcttcaacagcccggccgggctagctcaatcggtagagcgtaagactcttaatcttaaggctgcgggttcgacccccgcgttcggctattcctaaaaccaaacctgagatttcttttttgctcttttctttttcggttctatttatagaagagcacgtcaagatacatagtatcgacattttaaagttttgctatgcccgttgacggatggggtagagtattgttggtatctggtttgtttaatcccgcgtaacaggtatcgaagaaaatatatctatcgtttattgatgcaactagagccgtttatctctgtcaactatgtacaacacggccccacaccaagacaactcaatcatcagtcatatcgctacaaggtataaataaaggcccgaaacctctgcgcatcgggaaatgtaacgccccaaattacaccaaaacacaatttcacaacttcgttccctcgcgtccaccgtcactgggacgcctgggccgaagaggccctgaagagtggccggtagcatggctcggcccagccgctgacgatgccatctgggtccgtgttccttcgttttctgtagaattggtgcgaacagtccgtgtcccctggtgaagacgagggttcatgagccactggacttgcatgcgcacactgttgaccgccgcattcgtgtgggctatgtcttccttcatgcgtagacattcattcatgatagccatgctggcgcgagcatctaggtctgtgatagcatgcgaaagttggttgacctcctctcggagagattcgtgcagtgaaagcaggtaggtcgtggcattggatgagaatacactcgctgcaatgtctgcaggatcatcggtatggacgtcaacacgagtggaggattgctgttctcggccagattgggtagactgtccaccgctttgactgttcgcaaagcgcgtggattcgacaagagtggaccgaatgttggcgagtccatcctcgaatatctcattccgctgctgcaaatgtcgcatgcttgattcaagggaattgagccgggtattctgcatctcaaagtatgggcccattgcgactatgggacagctttgctcgtgtgctgcaatgtctgcccgtcggatcttaactggacatgcgtatttggatgcggcgcaaggaaccgcaacctccggacatgattcaatgtgttcccgtagcgcccccctagtgacaactgtctggcagtcggcacatgtgacctcaagaactggacaaagctctttctcatgctcctaggcgtttctagtcagcatctatataatttctaagaggttaaaaatgaaacaaacctcgtattcatgctctagaatatcctgttcgcaataagagcaccgtcgcactctatgaatacacttctgatccatcccaacgtccttgcttcgcgtcatctgatcgcatgaattatccggacacggcaatagccggtaaccacagtacttctcgacatgcgactggacatggcctcggggaatgatctcttgacatccctccgttatcaatggacatcgcactcggatctcgtcgcacatgttgatcagcaggcggggcacgctagttgacactacatgagtgggattccggcaagaaggacacgggaagtcgtctgagtcggtcgagcggaacgtggtgatggccgaactgaggcagctcccgcagaagacatggtcgcattgtagacgaacgggttcaacgaagggacagtggcagatcgggcacataagatgcgggtcgtactcggagacgagatcaaggctgcggaggtcgattagctcgtcgcagttgcggctttcctccatggctataaagtcttgtagattcatgttgtgcgaattccaagcctatcacgggggtcccaagaaaatatgcaaggtaccaacggacttaaattccctatgttgttgcttctttggaatgcggaatcagtgcgcggattcagttttgcgctagataccgaggtagatcgaagagtctgaatccattaggatgacactcagaaaacaaccaggtcagcgatcagagccatatgcctgcaagacatagacatgttaagattgaactgaagagaaggcgggatgactgcgggggatcaaggagaggcaaaaggcggaaagcggttgatccgcactcgttgccgcctattcctcgttttaccatctccactttcaacctcataaacatctcaaacagtctgactttatcttgcttggctgatcggaggtctttctccgtacggaccgtacaaacgcccacgatttatacatctcaacaggctgggatcccacacgtctcatcatgacgaacccttcccagctcttcctactcgccgatcacatcaaattatcccttttggagcgcgaaagagcaatctcactcgatctcgagcctaattcccaagatggagagatctcttggtctctcgagtccctccgagaaagcatagaggcactggaagccgaacaaacccggctagcaaactcgcacgacagcgcaggcgccgccgccctgaaagaccaactcacccctctccaagcccaatataaagacctgtcgatccagttttacggcgcagatggcgagccatcgagcaccaacacgacgcaggcgtcaaatcccgctacccccgatctcaagcagccaattccccaacatccaccttccaaatccgtccgcttcatggacagctccgcagcagcggcagccgtgcaagatgagattgacgaggaagacgagcgcaaccgcagcaacctcttccgtccataccgcgatgagccatcgccgcgactggatcactccaacatggacaacctgcagatttacgaccatcacgctcaaaccatgcgcgaccaggatgaccagttggatcggctgggtgaatcaattggcaggcaacatcagctgagtattcagattggagatgagctggatggccatattcaacttctggatggaatggatggggacgtcgagcgtcaacagacccgactgaacggtgcgagacggcggatagataagatccgtcgaaaggcgagcgagaactggagcatgatgactatcattggattgatcattattctggtcatcttgattgtgattctgaaatgatacccgatccgggtggttaatttggatggctgttcttttgtcgctattactcttttacattttttctttctttttggcgagcgggcgtttgcaactttacgcaatgcgggacgattgattctcctgatgtcttttcacagtggctcgaggcattataaagcaattgactcacttctagactcctggttggattcttgatcataatacatctacaacccttacccttgatcataacctttatttcatatccaattatctgtgagacagaccaagtgtgaacattctcattgaatgcgataaactcttaacagctcgactccaacagcctcacctgtagactgccccaataaaatacacgtgaaataaacgagggccgtgatcgaaaagttccaaaatgccgataactttcacttaatgagcgcccttctggctccgttgcttcgcctccttcgcctccttctgcgcctcctggaaaggaggatcggcatctaactcaccgcgatccgctttgacctgaatgaatccagtatattaggtctgatgaaagatgaaatctaggggctggtacttacctctgcctcgctgttactggccagctcgaatttccactttccactgccatccttgttgttcttgaggccttcttgcttatgggattcgtagtggtgggagagatcatcgcggcctgcttgtggttagtacagacgggagaagctggtgatagtggtgtactgacccctatcatcctctttcaagctccggactgctgaggaatggaacgtagaagctggaacggccaagtttgtccggataacttggcgagatgaggcacggaaggaggtgaggaatgacatgatgtaggtgagatgagtttagatggaatggtaagagtaagtggaagacaagatagatttgggatatatggaggaaagggatttgaaatcaagtaattggaactctcttccgggcagacgggacatttaagagcatctggttcggccaaggtgacagctcctgatgctatatgacatcatcgagttggtgggtcagttatgtcaaaacaaggacatgtgaacgcatgtacaagataatatcagttgaggcgattccttctgagatagatatctgaagatctggagctttggagctttgccatactccgttggtgcgggttgttcttgtagacatttctacatctatagaatctccccgcataaagatgtggagaccttccgacctctaacttgatcttgattttggaatagtcatagtcgccaatatgattcgaaggctttagtcaaaccgacttgactatcttaggtatagtttcctaatcgtgagacgggagccccggagtagcgaagaagattcgggaccacagatgtgatccagatgcgggaaatacttcctcactgtcgatccttagtgccaagtttccttcggcaattatggtcgctcatattcggccaacttgattcccgtccatacttgaaaatatcggaatacatggatgttggattgtttgttgggatagtggtcgtgagcgaagtaccgatgtggcagcattggaggacgcactgacagtaggagatgtcaagagtaggagatgtcattctcgacccacctattattgtctggcaagaaacttacaatctatctctctgtgattggtacatgcgtataatgcctctaccacttctttgctttcctgaaatattgaataccaatgtacatttttctagacgggtttacgtggactgtgacaagaaaattaagtctttcagctattgcaagctacctaaaccatgatagatctaagtcagcgcattttctaggactgacaatataaccgctgttttttcagaacttcagtagtgctgacccttttgcgaatgaggtcgagctaatcgtcttcattctgtggaatggagaaactctttgtgtaaatcaatagatcttaaagccaatagaacgtgtgcaagggactctctccgtcaccttcaagggaaggagatatcgaaatccagagcataatctgatagcacatagtctggagtggctagacccgggctttgtggaatcatgattgaagcgacagggaaccctacatgtagatatctgggttagccatattttgagggacaattggtagttgagaaggagtgattgacgtggctgaaccacttcgttgggctgcgcatgacgtgacctgttcatcctgggggcgacaagtgaccgcgataacggtcgatatcctttatcacccctgagaacaacatagttctagatctgactatagagagaagtctatggaggtgtcaaggcgcgtggtgcgtggtatatggtgcatgatggagattgaagacttcagaaagctacatgtaagttgcagagctatgaaacctgacatagcgaagtgctgggtaagccactccaatttggtgatttagaacaatacgagcctcagttgaaccaaatgcgaatacctatatatactccccgacaccttgctgctttaaaaaaacactttcttgtttataattgtgttgtcaataggctgccgtaggttgtttgatgtttcaatcgttgctttattcccaacaaagatggggggattaggtggtgcatcaataccagacgtctcataggattggccttagtcctcagcgaacttcagcggaagacctgcctaggccgtagtgttgtgttttgaccactagttaaatatttcacaggtattcctatgcttcatctaatataagtctactgggaaatagttcattgaggaaaatgaacaatctatattctggtatttcatatcactctatcaatcatgcaacttaaccaaagacaaataagcagctaaatcacggacaaatatatgcagctccataaatcacaaacagctaacaagatcgagttatatacgcggcgaagacaattgaacagaccgggggacggttgaatggacgcacaagattcctaatgtttatacctgtctccaagctttgtcttcaatatcaaatcgtatctgcataatagacctcttccagacaaatattctggtgatacgatgtgtacctctggggaatgctgacaaaacaatagcagccactcctttcccaagctctgtgcctagaatggccttatattcgggggtatcgaaatcccaggccacttgctttactgatgctggagatagcaaaaactctcgggaattaggtggttgagttttagcccaaattgtttgtataaagtccttggtgtccgcattgacaacattctcgagatagatatgtctcaaggtagtccgggcgaagtgaatatcgtactgtgcaagggcgacttgactccaccaaggtccatcgtatctctcaacatttctaacgataatcactcctattgcagtcgaaaaatgatgaaagttagttccgtgttttcttattgggtgctcaatggtcgatctctttgagatcttgacatcgtggtaatcttcattacctacagggaggccacacctttcgaggtcatcttgaagggcggggggtcttgcggcccagtggtcgaagtctactttccatcttttgctccgcggtttagcacgggttaagcttctgtattcgaaatctggtgcctgaactgtgcaattgggctcgtctgcatcatcgatccatctttgtcgcaaatctccccacatctcacgcctgccatactgataaatgtttaggtcaacggataaggagcgaacttgcgagggtgggacaatgggattattggcagagaaggcagggtcttgtagatctatcggggcatcgccaggagagaatttgcggcggcggcagataccgaaacaactcaagagacaacaattcgacatctctatgagtatattagattgaattaaaatgtataaaactagagtatcttgagtggtgtattgaatgatgaactcttacttgtctgtatgataccgatagaggcttatatagatgtgagttaaatatatggcgcatactcgaccgtgagtatcgcgttcaagaatatacaaaggggacaacaagaggacaggaagaagaaacatcgttcacaaagagtcgacaaaaatactagcactcgaacaagacagacaatgataatggaagctgagaccaagccccaaatagacactaagaagtggacaaagaaattgagccaaaaacacagagaacaaggagcacaacaagtgtgatgggaatagcaattagacggactattgtcaacaaagagaacattgtcgtagaccaacaaaagagcgtggataaagaagttaaaatgcaagcatacatgtctcgatctccaatactgaaggccaactaggttaaaattcgagatcggcattctcaggccgaaagatgatcattatatagcccggtatatactctgttccaaccttatcgctgtgatatggacttggctgcaaacttatatccatccgctattgctgcctataaccttgcatgcctgttgacttgtatcagacttctgtatctcatttggaagatgtcgaattgcgggataaaatcattcgaatcaaacatgtgcatggttattcaggttgttagcatcttgtgctctaggtttatgaacctatcgcgggaactttagttattctatggagcactacccctgaactagatttaacgtcagcgggtacttctgcagggccatttctccgaggcttctcctgtgcccatacgcatctaagaggaaaggggaaatgacactgccaatcattgccaacgcacatgtgcattagcgtatattgtagtacctaccgtgtattcttggtggggaacttggtattaaaactcgtagatctacctagaattatccatatttagtaggatttagttatgccacggggaaggttaacttggcaagaaccgggtagtgatatataactattttccaaatcaccttagaaatcctattaattgctttagtatatatcgcactgaacagccgaggcatcttttcaaatgaagaccatcttcctaagtgttcttctgccggcattagccaaagcgacggcaacaagtggtaaattcactgcgctgagcttcaacgtcgcaggtctgccatcactcttccaatccaacgatgtcaatggcacaaagagcgaaaatgccaagcagctcggcacttacttctcagagtatggctacgagatcatccatatgcaggaggtattgctccatcgagtcttccatatatcaataatctaacaacgctctaggatttcaactatcatgcctacatctatgaaacagataaccacacctaccggaccgctacatctgggggtgcagccatcggaagcggcctgaacaccatttctaaccacgactgggtagatttcggacgtgtgaaatggaacaagtgctccgatgcatcgggctcagactgtctgaccccgaagggcttcacattcatgcgctggaacccggccgatggagtctatgtcgacttttacaacgtccatgccgacgccgggtgagtaaaagccattctcacattttaatcgatccaaggactgacctccgtcaagaatcgaggatgaagacgaaactgcccgaaactccaacttgcagcaagtcgcagattacatcgacacttggtcgactggtaatgcagtggtagtcatgggcgatacgaacagtcgatacacgcgcgccgatgatacgggcatccgcgtcttcaagtctcagaatagcctcacagacccctgggtcgagcttgagaaggatggtgtctaccccacggttggagcagatgccttgctatgcaataacccgtcttctgtgcagacctgcgagacggttgataaagtgctgtaccggggatccgaagttgtgacgctcaaggcagacagtttcatctatgacggtgggaagttcacaaacaccgattccgaatatctgggcgatgttctctcggaccacaacccaattcttgtgaacttcacctggtcgctttcgtcatcgctgcgacaaagtcagttctctggaggtccgcatggggtgtggtttaatgatctgccgagtattccttcatcgcctgctgtttctgtgattactttctctggtgcggaaaggttggatgccgttgctttagagttgaaggatggcacatcgttcagccatggaggaactggtggcactaaggtctcccttgcactagactctggggagcattggacggagactaagctctgtactgggcagtatgatagccacactcgcaacttttatatcaaggctactaccagtactggtagaaccttggaggcaggcacctcaactgataattgccagacatttactgtctccgatggctttgcagtggcgggtttcatgggacaagccgaggacgagatcgatcaattggctttggtatatgcggcctactaaggaccaaggaaaacgattattccagatacgaatctgaatatgcagttgtttatttgccattttggtcaatcgtatcagatcatttatgcagtgtatgtcccaaacgccgaggtattccgtagaacccttatccatatgcaccgcgctgtgtaaataagccaacaaaaacgagcactttaatcaatcatatcctctggaagaacatcatccgggttctccccaaccgcttgtccgaccaagcgcacgacgcgcttgattgccttggacgcaggactgtcagggaagttatccacaaaactctcaccaaagtcgcacgccatgccaacgcggggatccagaggcacggcacctaggaaaggaatgcccattttcttcgccagccggcgaccgccgccagttgtcgctcggaatatctgcgactcatgcgtgcagttaggacagacaaatccagacatattttccaccaagcccaacaccttaatgccagccttgcggcagaagtcgacctccttgcgaacatccagcaatgagacttcctgtggggttgtcacaacaacggcaccgtcaacgccagactccttcagcaaagagttgacggacagatgttcgtcagaggtcccaggaggcgtgtcgacaataagatagtccagctcgccccagtccacatccttgaggaattgcttgatcagtccgttctttttgggcccacgccagatcaccgcgtcgtcacggttgggcagcatgaattgaacgctcatcgcgccaaggttatccgtcacccatacgggactccagccggcattgctgatgtgaatagtctctgactccacgcccatcatcttagggatcgacggaccacagatatcggtgtccataatgccgacggtagagtctggatttgcggcgaaggcgtgcgcaagaagggtcgagaacgtagatttgccaactcccccctttcctgagagtactaggatcttgtgtcgtatttgggagagtcgttcggtgatgatcggaatgtcggggtcgggacctttaggcgcggtggcgcagatctgttggttcgggcaaccggcacaagcatcgccttggccagcttgctcggattcagggcctgggcagtgttctgtggagagttagtgtgtgtattgcggcaatggatttagagcatgcgtacctggttcgggagcgacgaggctgggcgtcactttggacgacactgcaagggattcctcatactcctccaagtagggcgccattttggattgctactctatgtggcaattgaaatgagagcaagcgcggaaaataagaagataattgttacgccgttgcaagaaacagataaattcgacgtccggtggcggattgatgcttgataagcggagatgactaaaaccccactgcgattggcggggcaaggcacatctgcggtgtcggagtgtgaaatatctcatgttacatattgatatattgatcgccatagctgaagctataaagtactggggggaataaggcattttaaagaactagcttctgatgatacataattagttgactatctcttatgtccacttgccaagccgaccagatctgtataggatacgagattacttgatcgggctcgcatcactcctttcagcgcaagaaggtcaatatttatctgccttccttcctgcttctcttagggggtttgtttgagcgcagacccggtcgtgttgaaaagaacctcagcgctagccaaatctacagacacaagtttcagagcgatagtcgcaaacacttcagactcatgtgcttctttcctctaagattcgaactcggcttttttgcttctgcagcatcgacatgtgcttgattcatatgataatcaggatttgagacaaattttccctgcttagtctggacaattgcgcgatattgttcgatataaacacagagtaaccagctcagattgcagctcaactatctaataacacgcattgaagactgatttccagttctatccgagcaggcggtcgatgttgcagtcttacgatatttcaagccttgtttgaagcagctcttcgcatctccaacatgcctagcaactggtcggactttcgctttctcattttccagaatttctgtttctccacagatgtagacccggtcatcggatccctcgcggacaaagcactcattccgctcatcgaggaggccgaaagcggtattcttccgtaactcatacacactctgtacctcgtggacatatctaaatagtccgtagggttaaagaatttcgggcctatcagaacctaatggccagagtcttgatctagcgcttccactgcagtatgatggacgtggctcagcgcaaaagattgcatccagcatgctcctaggacaggctgcaacttggattagattatcccccgttgtatatcgcgtagtacatacaacccagtgagataagtaagcagtgcactattatgagtacccgttatcaatctcgaacaacggcaacaaggggtttcaattctcgcctggacaacaaccaggaatttggattggatgaggccaagtacccactggccgtggatgatctcattcgcccgtggaacttgcagacacgatcacaatgcattttatatacgagcttgggctcaaagggaaatgcgcatctcaatctaagcaggcggtaggtgtacaccggtatgtgcacagtgctactcggacaactcgtacagctcgtaaaacctgccgcacttgccgcactgcacgataccccgctgttgatcggtgttgtatactacccatgggcaagagaggaatggatagacagaagacgtggtgtagctaaaagcctattcaaaatcgaatcagacgagacctttcccaacaactgtactttatcgcgaagaaaccgactaagaccacttagcgttggttgatttaaagggccccatttctttcccattccgctccattcggaggcccgcatctctcgagagacttcacgagtctcaacggttccactcttttgtcgggattggtataaataagaactggtctcctcggtaaatctttctccttgtctttcttgagaaaaacaaacaaaagagagacctcccattgtccggaccaaacccctggacaacaaaggtgtttccgttccccccccccccaactgactaagcatagttccgcttttcgattatcacatgcttctgccgtcacattcggcctcaacagttttctctctctcaacacccttgtagagtggaacaccatggatcaaggcctttcaacaggggcccatcaagaaattgatgggttacgtgagagaaatacacgcgtcgattcaacaatcggtcgcgaggctttaacagcctttggggaagtgcagatcaatgataaagatggcaaagaattgaagacctttgggagaactcccgatggaacaggtaagcttgttatgtattaatcatgtttgtattcgaaggtcttaatcggatgcacctaaacctcccgttgtatttcatcgagcccgctgctaactggatccgatgtatcagtgtttacggtccctcggactcatgacatggtctcccagttgcttttgccgtccgagccaaagaatttcggtgatcttgtggtattgattctattggcgggtcatattctgtttctctgggcacttcccaagggtgccaaaatcccggtctttgccgccacctacctcttctggcgcctggcctacaatgcaggaattgggtggctgcttcacaatcagtcgcaccacaagacactaattcgatgggccgagaagaccaaagtgtttgtcaatccagccactgggaagaaccctcaccctaaattgtataattggatcaaacgggaattggagaccaagatcccgcaggattactcgttcgacaatgctccaattgaatacaacacctggcttgtttttagacgtcttgtggacttgatcctcatgtgtgacttcacttcttactgccttttcgcgatagcttgtggtcaccaacccgttgacgagagtattctcatgacggttctccgatggtccgcaggtattgtactagtgctgtttaacctctgggtcaaactagatgcgcatcgggtggtcaaggactatgcctggtattggggtgatttcttctacctcattgaccaagaattgaccttcgatggcgtgttcgaaatggcacctcatcccatgtactcggttggttatgcaggctactacggaatctctctgatggcagccagctataaagtgctgcttatctcgatcattgcccatgcagcacaattcattttcctcgtccttgtggagaacccgcacatcgacaagacttataacccgccaccacccagaaagcgctctactacctgtgcggattcttccacattgcccaccgatctagacactccgacagcgccaactccatctgaagaccagactcccaacgcgacatcttcgtattcggccaagccgccgcagtccgttcacaacctcctcggactgcacaacctggatttgtatagaaccactgattcatcaatcatgctggttcaacttcttgtattctctattacagctttgacaccctctacaccagggtatcagttactgttcgtggtcctcgctgccgcttccagaatctggtattccgtaggcattgggtatatccttcggaaccaatccaattccaagtcttggacaaggcacttcgtcaagtatggtgacacgccgcaggaagcgtggaaccaatggaagggtacttatcatctcagtatgatcttgtgttactctagctttattgctgccgtgtggaagatgtacacattcccggccgattggaactatggtctggttctgttccgacatgtgctcggagctggcctaatcagtctgcaaatctggacttccgtcagtatccatgagtctctcggtgaatttggctggttctacggggacttcttcttcgatgactctccaaagctcacctacaacggcatttatcgcttcctcaacaacccagagcgcgttctaggtcttgcaggcgtgtggggtgctgttctcatcaccagtagcggagccatcgttttcctcgccttgctgagccacatcctgagtctggccttcattcaattcgtcgaacgccctcacatgcagaagctgtacggtcgtagccttcgccaggatgcgggtctcgttaagagtctgaagcggtccctgccaccctctctcaagcaattacacggaagtgttgacaagatgttcgatgactcctttgagttcatcgaggagatgcttgacaatgcccggcccaaactagccgcgggagtgaacacctttgttaaagataccactgcgctcttccagaagtaccctgctcgcgttaccatctcccgaattgatgcagacctggctggattcgacgcccgcgattattctctgtcggttgaaggtaccagtgctctttccttcgaggagagcgaaaagaacaagggccgtgaaggtgcaaacgcacgcatgcccctggaccgccgtggtgatctcaaggacttgacatttgaatatggcgccccgatcaaggtcaaatggactgccccactccaccacagcaagaaagattggattggtctctaccgggtcacagacaatacctcgcgagaggtcactcgtgtttcatcgcaaggccgctgggtcgcaaccaacgaaggcgcatacgacaactcgacctgcgagaagggtatcctcactagtgatgttgttacctcgtcgtctgagcgtcagggccaggacccctgcgagttcgcatctggtgagatcgttctttctggcaacaagctcttctggaccgagggtgtctttgaactccgctaccaccacaacggtatgcacaatgtcatggctatctcgaggccatttgagattcgtattcgccggtcggatgaggatgaaactatttccgacggttattcttttgtggaatcggctgttgaggatgccttgttgcccgttgttcgtaactgtttcgatcgtgatcctgaaattgccccagagactgttgatgagcagttcggtagccttgttgaacgggatggcaagtttgccaaacgtgttgtctttgctgttcatcagatgtaagttctctttctcaagatcatttcaatcgttgatcatattctgacccttcgtcatgcaggttcggtatcgagttggcagctgaggttgtcaaggccgacggcaacgtgcggaatctggcttggagaatctgcaacgccaagaaagttcttgtaagtatcaaattgcaggctgaaatctgcttgttggaccaaagctaactcgtcaacgatgcaggctccctacagcatgtcaagatccaatggaacgacgacaccagtcgaggagagcaaataatgatccatcgaggcagattcccgatacgtcaaacccagccatgcacttatgttggcagacgacgactcgtgttgaagacacgcctcaatctcaagtggatttggcattcgacagttgagtgctttacagcaaaaaacaaaatcaccaaatcacaaaaaaaagaaacatgtcataactaggagaaatcatgtgttgaagaaaagaggagttgtcctgttttgcttttcttgcctcgcatgtaaatgatgatgcgaggttcaagataatgattcccatgatggttttgtttagatttcaggggttgggtgggttgcagtggtgattttcatgtgtcttgccttttggggacgatttggctgtgggctgattactttttcttctctacttcgtacatagcttcaagagaaatctattgctttttttgtgatcattgacttagttctctaagactcttaggggaatgggagacataaaaccactcgcaataccaatatatcggggcttgtttgatagctctgaagagtatatgataacaagtaactacataagggcctccaacttcaaccatctgctcttagccttcggctatcagttctagtacgcatcggaaaatagacccggggagaaggcatagatgcagcccacaagtcgtgggataagcaatcaaactcatttactcgactacgaagatttcatgacgcagatgtttgctaatatgcatgtattgaactaaactatatattatggtatcgaattggagacctaggcaaagctttgaatgctgtcagcgaaagtccaaagacccgaaggagcgaaacaagcacgaatagcttcacaattgcaagcaaaagtagaagcatatatagtattcagtcaagccggttaactcatcccatcccctgttggcccctcgcaccgaactgtcacccaagacggataagcagcccagcattaggaaaccaacacaagccaagtatagcagtaccatgccgcggacaagacaacaatgcaaagaacgtaatcagacgacgacaagcccaaagcctccaggctccacaaccttcctccctttcacacccgaaggcacgacaggtccagtataagggagatggaaaacagtggatcgacgcctgtattcctcacaacgctgtacggcttgggtgcaacctgaggggcggtcctccaagaggtcgttgaatggatagactggttgtcatcataatagctgggggagatgtgcagttgaaaaagacaatgatgtaccttttggatatatgaggtagaggaccaaacaattgatggtttacagctagatctttttgagttgttagcactcttgtcactaacagggtggttgaaagacaatgataatgactcaagaaggatcaggagtttttggtaagtgttttgttatcttcaaaaattttgcagaagcagaactgaaaaggtttctcatcataatgagtgcaggtgggaaagtaaagaaaaaaaaagaatgttcttaccttattagttcatatttctcatgtaatccaaaacaaacaagagtgttttattcctgtcttaagcaattgttagtcgctgatgcgtagcagtagaatatttgaaaacaagagtaaaattgttgtcattatcagatggtgatgcatgtttgttcatggcccattttttgtcgccaaacaggagttggaactctctcgatcatgtagacagggttggagggtttgaagggtactcacttatagcatattagtgatggatgtagtaaaatataacaactatcatcaagattccactccctcagcattagaagaagtttcctcagtaaattcagagtgtgtgaagaagagaaaggaaacggaagagcaaaaaatcgaagaaaagtcgccaaaaaaccaaacggcgctaggcggtggggcctacaaacagtgcaaactcccaagatttccgtttctgggactttgaccaggatctctcgacagcttcagttttgcgccaaatcacctaaaatggctgatagaagacgtatcaatgggccacctggtggcacaagacctccagtctatgcatccctccaagaatcctcgacaggcgtcgcaaaccgcgcccagcgccagcgccaacccaccgagctacggaaaatctgtatgaattgccgacaagcttcttgttgatcgcagctaaccttcaatgctctagttctcaaaacaggactgattccaaccgcctcaggctcttcatatcttgaatttgaaccatccgcttccctcgccgctgcccgctccaaccccaaatctctgatcccgccctcctcagcactcaaactggcttgcactgtccacggaccaaagccgctcccccgctctgctgcattctcgccgaacctcgttctcaccactcatgtcaagtacgcgccattcgccgcccgcaagcggaaaggacatatccgtgatgccagcgagcgtgaccttggcgtacatctagagaccgccctccgcggcgcaattatcgccgagcgctggcccaagagtggtctggatatcactcttacaatcattgaagcagaggatgaccgctggtggggtgatgctcccgactcgcatgatgcgtcttggggaatgatgaacgttctcgccggttgtatcacagcggcttctgctgccattgcagatgcccacattgactgtcttgaccttgtatccggtggtgttgctgctcttgtctcggacgactcaaatcagtcggcatcatctgccccgcgactcatgcttgacattgatccagcggaacaccgatcgattttgtcggcttgtgtggtggcgtacatgcctgcgcgcgatgagattactgagctctggcttaagggcgatagctcaagggtggaccttgaaaaagacgatggacgtacgggtcatgaagctttgatcgacggagctgttgatgcggctcgtggcgctaatactgtcttggctgaggctgtaagggaatctatcgctacgtcttttgctcgcgtctaaaatactcacaacacataacgaatgaatgaagtttattggctctatcattaatgtagcaataggctaatttttgtgttcctatttaccgatccatttgaagctgtgtcacaagactagaagatgccctagaacgcaagaatatagttatctagagtagtgggtttgtaaactgatagcctaagattttaacaagctactaggtgtttttactccgtacttgcttttataatcctacctttttgcatgtaattctccctcggtgttgttgtcgtccaaaataggtaggcttcattgatatacaacggagactacaacacatgatcgcagtaccatactccgtgggtcgcctttcaataatggtatgttgttagttagagtatggagtagttacaagacaataatttaattgactaacataaatattttcatgttctaaaaaaaactggtcaaagccaaaaagaaaggggtagatagagttggacgttagattctcccataaaacaaattatgccgatctacggagtaggcaaggcccatcggaatcgatcgatcgtgggacatcggatctaagtagttcgtggcatacaaccaatgggcacatacaatatgttgaacaaagtatgaagtactaccacaataggacttagaaggagtagataactcctgcagcgttttggcagggttcaacatgaaagatcgacctcaatttgcccctgagagtgaacatagtacggtatactagtcatgtactccgtaatacgtacaacataatatagcgaggaggacgctactgcggaaaggaatccgagacccgctccagagacctttttgctctttgtccctaaaaccaactccaaagctccatccgactttagcactattcaaatagccagagcccggccgtaaatggtacagcgtatgtacttggttcatgtgttcccgctaagcagacggctcacggtctggcgatcacctcatcacaccaatgaccggcttgcgcggaaattggaagctccatcgcatgccacaattcaagccccgaatccactatcgttctctcccgttcgccagaattagacattgaaacccctcgatgaaccgctgattggtgcacgatcgctggtggatgctgttggaactcactagagcagcttctcgcccatcgaccagcgatatggatcctgtcaaaaaacttcacgtgtggatcacagctttggatggggcagcctatgatccagtctgaacgttttcttccacgcgctgcgaaatcgactcattcagatctagttctgggtaaccttttttttctcgagattggctcgaaaagaaagggaaagactcgactcgagctgcaattgccgaatcatatttccaaacaaagaaataagggcatacggagtagatcctgagaaattcagatcttaggatcatggagaagaccgggtcgctcccccctgattcagacacaagaccggcgatagatctgcactctgctgtgacaagatacatagtccgtactggggccctgttctactttttgggacttcgcgacttgactaacttgactttcttcttctttttcctgccttctgatgatatgacacctgaactgtgtgacggtcttcaattcttccagtttagatgtcatgacatcaacttgttcaattctttatgaccgctggtcttgtcgctctcttaattattagcttgactttattgtatcttattttcctctcgtttacactaccgttgtccttcattttccaattgcgcgccggttttgcgcttgatatctacttcatttcttcaagatggtgccattaaagaaactattccacacggacaagtctctttctcgttcagtaaccacccctggacacgaggactgtggaatagacctacgctattttcaaacggcggttgactcgcctacacgaagtccatttgagggtggtttcccgtccagaaattcgcagtcactagatgtgggtcatcattttgatcagatcgaaaagcacttcgaagatctacatgatagactggaacggccgatatctcctcaaccccaattgcagcctctcagcactcatttcgcgctctctaaatctcaaaatggccgacatatcgacttgatggaagctctgttctccacggatccaacaactaccccggaaccactttctcctcctgctagtctatacaacgaagatgttgcggaacgaaacatgacccggtttatacggattcagtaccgcaatggacttgctagctctggtatactttcggccctataccaagaggatgtggccgacagaaatattgcaaaatatagcgcacctgctcgccctttgtctcacttaagttctcggtcatcgccagctgcgcctggtacggtacggattccagaaagccaacagcgcaaagacaggaagcgggaaccagggaagcctagctggacgtcggcagaaaatctacggacacagccctcgccagatgatggctcgggtacttcatctccacgatcacagtcgcagcttggcaatcgcctcagaccccagagatctgcgccgagcctctctgcggacgaaggcgttgtcccacaaggaaatgcacccccagctcctgtctcgcgtttgggcgttcctcctgcctataaacaaggcaaaaggtggagcaacactcctctgcctgatagtcctacaattcctatccctatgggtgaaagtgacggcaccgcggaggcgccacgaccacctgctacaatagaccgcaggacacaaggatcgcttcctccgccacagttatcagaattagcctccaaaaagaatgcacgaggactttcaatcaatacaaaattagctgccaaaggacgcccaaaaattgcgcatcgtgccatccagccaccaacaccctcaacttacgaattgacgcaggcacctagcatcgcagaggtcatgaacagtcctctgcctgttcccagcccaatcagtcccccaaaatcatctccacgcttcaaaccctcggacgtgatggaatttttcaccaaggcttataagtccgttcaaagcccccacacaacatacgagacactgcaggacgccatagtccgcgaggtcaattcccacgaggcattccgtcgagtccccgtgcccgccccggggcctccattcacgccctcagcagaccaagccgaattcagcaactgctccagaccagcaacgggactccaccgaagcgcttcagcgaagaaacggctcatgaacaggaattcatacaagcacaagagggcccccgaaacccgccgtagcatctcaacaagtgtcggctacgaccgcctcctacgaaaagtctccggctcccccgctcgccgtcgacacactgatgccccacccccaaccccaggcttcctggccgaattccagcctcgcacagagcccatcatcacccgccctggatccggagagccaatcacgtatctggatgtactgcacgcaagcagtgagcatcaacctctctcaaccggcggctgcgcaagcctctctgtacctcgcaaacaaggacgctcgaaatctatcggcgacctctgcttgggctctaatatgccttttgtccccgggacagtctactgtatgcaagctcactcggctccttcgagtgattcctcgcatgaagacagcgacgatgatatcattcagcttcctaacccgtgtcccccgccgcgtgtgcagattgaatgtgtcgacgagaataacgtccgctatgtcattgatactgcttcgccggatgaggcacacaaacttatgtactggcctcaccaggttcgccgcaatggtaccaccagtccttacgggaatagtctgtcaccgttgtctcgcgctcgcatgcagcttcgtggttcgcgctcggttgagacttaccaggatggaatcaacgttctttttgcaacccaggcgggatgtttctattttgccgcatgataacgatgctcccacgactttctccctctctctcgccttcttgcttcctccaaaaaagccgttcaatccgttccaatcttggccatgtcgaattaaccttcgatatgccggccaatccttgtcataatcatacaccttgtacccatatatcctgtcatatattaaccctagtctatctctcatccttttttttttctcttgtcttataccggacctccaattatttccttatcttgtcttattgccgtgcttgcatgatttggccggagttgcttattattattacaggtgtatattaaagctccatagcgtttgccatatatatcaatatcctattgttcgccttgcaatatttttctctctcttcatagacgaaatgggtattgtttgccaatttctttgccccctgtgctatggtactttgatcaactcatactatcgtatcccactacattgttcttttccgtatcagcttctgtttctcgttcgatagaggctcggcttaggatttcggatccccagcgtgcatatcttgtgctatttgtgcgctatttattgatagcttgacactggtctacgggattgccgataaacgaaaggaaataaaatcacagaaaagcaataataatgacatgtctcattttcataatatcattgccactacctgccatttccccttaaaactccacattgacaaatcaacatattgaagggacgccttggaacccacagaagaaaatgccatattgtctgatacttcgacttgtttcactatgaaccggagagtgtcgcaaaatacaatcccctcggtactcgatggtggcggccactggtgctttggactgcatggtagttctggcggcagcagatgcaagtcctgatatggatgcaacgcaatagcttaatatgagcctatatcgagatagttagcgttttgttaagaatcattgaggggtaagaaactagggggtagaaacttacggccaaacatgcaccacttctcagcgaagcgctggcacttggggttgcagcagggagtaacaccctgctcaataccctcgggctgctcgaaaggaatgcacagagacttggcgcccatactgggagccttagcatcctcagcctcgccggagtcttcctcggccttgcgagcactcatttccttgatctggtcctcgcactcctcggtcaagcaatggggaatgacgcagaggttcttgttgttcagagcgggaacaaagtcatcccacttggtgatctggatgcggtgagccttgaactgctcgtcggcgcggttgtacaggtcggtttgaatggtctcaagaagcgcagacacgccagtagccagctcggggatcgggatactgcccttgccatccttgccggggatatcacggcgggcggtggtgacaaagtggccagcggactcgccagggccgaactcaatacgcagaggcacaccgcggagctcgtactggttgaacttccagccgggggagtagctgctcttgtcgctgtcagcacggatgccggcggcaacgaggacggcgacgagaccgtcgacctcgacattgagcttctcgcgctcctcttcagtggtcttggctgtaagaccgactggaacaatgataacctggacctcagccacacgaggaggcaggaccagacccttgttgtcactgtgaatcatgaccatgacacccagtgagcgagtcgacagaccccaggagttctgccagacgtgcagagggggcttcttctcatccaccgtggaggtgggatcctcgacggtgatgccgaacatcttactaaagttctggcctaatccgtgggatgtaccaccctgaataccacgcccagtggcggggatgtagccttcgacagtggtggtgtagttaccgccggcgaacttctccttctcggtcttctggcccttaacgacaggcacagcaaggagctccttgtaaatcttggcatagtagtcaaggatgctcaggacttcctcgcgggcagcaccttcagtcaggtgagcagtgtgacctctgcacattgttagtatgtcattttcaactaagaagaatgtcaaaaacatactcttgccaaaggaattctcttgaacggaggagtggttgagggtgcttgaattcccatctcactgtggatattagtaacacttcgagggtatggagaaagaacggagaccgcaccgactgagttccactggttgagacgaagggggagatcacggtgactgcggatccacttggcgtagtaggggtacatgacagtctccgaggtaggacgaatggcaatcttcttctccaggggggtcgagccactagaagtatgtcagtgtagtccaattgaattataaaggtattatagggaagggacggcatacgcgtgcgtgacccaggcgacttcagcggcaaagccttcgatgtggtccttctcccgctggaggacatcctcagacacgaatagagggaaagagcagttcttgacacccatgcccttgatggctttgttgaagtattcctgaatctcctcccagatgaagaacaacgcaggcttgagaatgaagcaaccggagacatcatagtagtccagcaaatcacccttggtgagaacctgctggtaccagccggagaagtcctcctccttcaagacatcaataccgatcaaagcggcaccatcaaccttcttcttagaagctttcttagcctcttgcttgccaatacccttctctcccttatttgaggccttcttgtcagccttatcggccttcagtttcgcgagcttcgcggcttttttagcggcgttctttgactcacccgccttgtcatcggcgggggtttcagtgcggtcaggcaaggtctggggggcagcgccctcgggggtgcggtcttcgctggggttctggctagccatgttgaagaagcgagtgtctgactagacaatgaaggagagacccagtaggattgtaagcaagcgaaatcggggtatgactcccctccttgaagtgggatgcgatatcgaaaattaccagcacaccgcttcggcagaacttttagtgcccacagcacccccccagaagccagacagctctgccatcgcactcgaatagctcatatcacatcgtctgttttaaatatggcaggcatttttgaggcgccgcggaatgcggacacgctctgtgagttttcatctgaaccatcatcgttttcgttgcaataaactgaccattctcgcacagtcttgggtgggcagaaaatcaccggtgctgatgtccgtgagcagaatggtatgttgaattattgatggatttcccgttcttggggatggataactgattccttgcagttctggcaacacaagccatcgctaatgtcatcaaatcctccttcggtccgtccggtttggacaagatgatggtggatgacataggggtatggaaacgataaaccccgcagagcttggctgcaacttctaacatctgacaggatgtgactgtgacgaacgatggcgctactattctgtctcttcttgatattgagcaccctgcgggcaagatcctcgttgagctggcccaacaacaggacaaggaggtacgggcctctacaacacattttcaaacgcacacgctgataatgatttcaaattcaataggtcggagatggcaccacctcggttgttctgatcgccgctgagcttctccggagaggcaacgagttgatgaagaaccgtatacaccctactacgatcatcaacggataccgaattgccctgcgcgaggccgtcaagtatatgaatgaaaatattacgactaaggtggataatatcgggagggagagcttggtcaacattgcgaagacttccatgtccagcaagatcatcggttccgattccgatttctttgcgaacatgtgtgtggacgcaatgctgcaggtgaagtctttgaaccagagaggcgaagtcaaatacccagtcaaggccgtgaacctgcttaaggcccacggaaaaagtggcactgagtccgtactcgtggacggttacgcgttgaattgcactgttgcttcccaggccatgaccacacacgtggccgacgccaagatcgccattctcgatatgaatctgcaaaaggagcggatgaagcttggtgttcagattacagtggaagaccccgatcaactggagaagatccgtcagcgagagtccggcattgtgatggagcgtgttgatatgattctgaagtctggtgccaatgtcgtcctcacgactaagggcatcgacgacatggttctcaagctcttcattgaaaggggggccatggcagtccgccgctgcaagaaggaagacctgcgccgcattgctagggccaccggtgctaccatgatcagcaccctctctgacctcaacggagatgagaagttcgacgcatcacaccttggacacgcagagtcagtttcgcaagaacgtatctcggacgacgagtgtatcctgatcaggggtaccaagatccacactgcggcttccattattctccgtggtgccaacgagtacagcttggacgagatggagcgctctgttcacgactctctgtgtgcgatcaagcgcactctggaaagcgggagcattgttcccggcggtggagccgtggaaaccgcacttcacatctaccttgaggaattcgcagtcacagtggtaagtaatactgttcgctattctttgctcccatatcggtttctaacattttcactaaagggctcccgtgagcaactggccattggcgagttcgcacaatctctccttgtcattcctcagactctggcagtcaacgcagcgaaggattcatctgagcttgttgcccagctccgtgtccgccacgccctgtcacagcgtgtgcaggatggcgatgctaacgaggaggagaaggccattgctaagaagaagacctaccgcaactacggtttggatctgacgaagggacgggttcacgacactttgaaggccggtgtgctggagcccagcatgagcaagatcaagcaactcaagagtgctgtggaggcttgcatatccatcatgcgtattgacacgatcatcaagctggaccccgagcagcagcaggatgacggccacggccactaagcctaagcttactttgactaccccaatccccaaaaaaatggcagtaatatgatgtgacatagatgatcagcagtagtaaattctcatttccgctgcactgcatatgaacgaatttctcttgaagtagatacatgaaactcgtagccctaaacaaccattctactagatctatatccctcactgccgcctggcagccatcaacttccggtattcctcaacgatattcctccgctcaccagccaattcctcacggcgtctcaaactcccaaccgcagcaggcacattggcaacatcaaccttagccccgccacgcactttgaagatctcccggggtttgaccaattgaggcggcgctttcgcaacctcaaatggattcctcttccgctcctcgtcgcgcttcttcagcttagcccaaggatcaggatcatcatccccactatcagcgtccccattagcattcgtccccttcttcttgcttttcttcgcagccttcttcttccccccagcagcctcaatctcccactctttccactgccgcaactcaacctccatctcttcctccctctcttccctctcctcctgctccttgtcgcgaatcttagcgtcctgctcacgccaccccttctgcaatcgcagcaggtgcttctcatgcttcgtccgcttgtgctgctccttgttcttggcatcacccgtcttgaccgacttggtcatctgcgacaatggcatttcgcggtcaacacgtgccacaaactcggccagccgctcgccaggcatgattttgggcgtttcggtcttctccttggcggcggttttgggtttttgtgtctccgctgccttcgcgggcttcttcgatgacgctgttgagtcttctgtagcattgcgcttgcgcttgttcgggcgctcgcccgtctctagtcccgatggcgctcgtcgacctgtctgctggtattgcattaggcggcggaatgctttcggggtgtcgtcttcggtgacagtcttgaggcggtgggtgggtgctttgttggcgctctggttctggtctttgccttggttcttgttgacgagttttttgccattcttgcctagcttaggcttgactagatcgcggactggaagggctttcgcgatctctgagggtgggagattgaagtggctgccgcgagtggaattgtcagttttgggctttggataaacttagtaattactagtgctcacgctatatcggcttcgccacgtctcttgtgtttgtgaggcattttgggtggttttgcaatggaagtttggaggattggagttgttggcggaactttttttcatcgaggttagccttatcttacttatcgctctatgggcggtccacggatctccccagcattcgccattccaaatatcagtctattggcatactcgagaaagcagtaattgaacttgatgaatgagggatatgtttgttcagataatgcaaataagtccgagataaagggtatgcttcgctaataatatgcccccaaacgccagtaaaatgcccacaggcaaaaaaaaaagaacacctaggaaaatgcaaaacaagaaaaatcacagaagaaaccggggaatcattcatcttcatcgtcaattgagtctttcatatcagcccagccacacatgtggcgtttaccctcagtttcaccaccgtttcgaagctcgcgagcctcaggtccctcacgccagcatcgagcatcgtagtcatcactcacggaaatgagttcgccagatggtgtccaggacaaaccagtgacctctttctgatgaccttcgatgaggggagtgcctgattggtaaattgggatggtatcttcgagacggccggacaagccgattccagagttggtgcgacgaagacctgagcgagtggtgaaaagggaagtcctgctaggcagagattcggctggtgttttcacggtagaattgagaaatcgttcatcggtagggaagaggatggggcagtggtcactgctcccagttgccaacatctccggatgatcgtagcttgctttgcgcacagccaacttcacatagaatgaggatatttggaggcgaggatggcggaaaccatagagaggcccaagaccgtccttgtcggagcctccagtccttcgtggacggttgttgttgagcgagagttcaggagcatgcccgagaattaagtgtgatgtcgaatatgtgtaaacagtattatcccggcaaagtgtgtataagcgtgagccatctcctccaaatgccatggaagttagaccaaagcgtcggtacttcacatggctttctggctcttgcgttgtagatagaggaatgacgggtcgaccacggcgattgttatgggctgttcgcaaatcccacagtctgacgcttgcgctagcctcggaagccgtaacaaaaagattttcgcgtccaggcgagagaaaagcgagggaagtaacggtgatgtcggttcggccaattggtggcgcatcatttttgtccgtggtcggtttatgagaggtcgtgtatgcatgagcaccttgaatggtattcagaacatgtgggtataacatctttggctgcgcagtggtcacgacattttcggtctcggatagggagcattggacttgcaatgcaggccgttcaaaccccttgcagcggagatcccagatattcacatttccatcccgactgcaagtagcaagaaccttattgttggatgctggttggaattggacacgcttaacggaggatgagtgattcgataagcagtggataggtcgttgtgttgtcatatcaataataagagatgtttggtctccagatgctgtagccagtagcatgtcgtccgatgagaactcgagatccataatcgaattcatgtgcggacggaacccaaggtatgcatcagcgaatccaggatcctcgtcaatcgatgaatccaagagccgaattccaccctcttcatcgcccactgcaacaagagaatttgcttcccatttgttagcatgtgtaggatcagtcaggtaaaatatgactcactattgcatgaagcattacaaaatgggagggccactgaacgctccgatccatagctagaacacatgtgacggtcccgcggtttcgaatagaagttggaagttagatcttgccagcctagagaaaatattagaggtgtataagaaagccatggggtaaataccaaccagcgccagagttagatcgtagagttactttatttgctcgagcccccatcacatttcgcataaataaagcaccggatgattgcaatgcctgggagcggcgcacaggggccacggggggatttcgtttgggtggactcggcggtgctgatgcatcaaggcggatgttgatgtttgaaattttaatatcttgttccacatcctgcgtcggagaccggacacgaactctcttcagaggcgaggattgcggcgagacgactgaagagaatgagttctttcttttcctgcttggggtgcgaatgaagtcctccggtaagtcatcgtgggggcttctggtgctgccagccttagaggttcttgaaaaggccggtcctagacgattcaccgcgggcgatgatagtgcccgtaatgcctggcggctagttgagggcgtgatagaagtatccccgactggtaataaagagcgcggggtaaagaatcgacggaatgaccggggcgttacagtcggtggctttctaggtctgcgagtatcggaagcaatagacggcggggatgagggtggctctggaggaaggacaggctctgaccggggtacttccgggagattgaaggtgtccattgtgtgttgaacaaaaagcaaagagaaaatcaaaggctatgcaagcattggtggtattggtggtggctggaaggctaaagagggtcagagattaatcggggaagttggatcttttcccgtgtcgcgacgtgacgcgatcgtgttaaggcatctaaggcatttcaaccccctccatccttaatgccgaactccttcactctcaattatttccccttgatgtttgaataaggcaagtcagtttgaattagttcctaggttaaagtattttcccagttttggtatcaaaacgcgtgaaatcacacgatattgatcaatttcccaatatcagactactataatgatggaacgttggaacatcaaataggtcccttgattaacttttaaagaatgctcaaacagagggagatgcaaacagagggagatggacctaactcaggttatgttgtatgctcgaagtataggtcctgtcacgtcatgtgacctacaaggctgtataaacatatattgtccaaacatagaaactaccctttcctcaacctttcccttgaaacctaagcaacatttgctccattctaacgacatatgcaccttgcctctcaatcatacttttcaatttccacaaaatgccaactacaacagctctttctccttttacgtccgacctagagttaaagtcgtactgtgaagaccaagacttcctatgcaacggagagcccgagcctaacagtcgctcgcagactttgatctatcattttgaaaacaaaaagtggtggatcaaagtaactttcaaaggcgcgatttcttctttcccccaaaacaaaacaaaacgcgaacgacgaaaggaataccaagactttgtcaaattgttcgactttgatcccttggcccttctggatgatactgtgtctgaggtaatattgagcgaagacccgggaacaattgattctatcaatctgcgtcacgacctagaagataccagcaatcgggttataaggcttgttggaaacctatgattctatatccgggaggacccattgagagtgacttatccactatgcctccgatttccctctttccgcgctatcaatatcgcagaattgatagaagaggatgaaatcaccgacggagtattccgcgttttacataggagcgatagaactcctcacatcctcaaagtagtcaatcgccctctttatcaaccacgcgactcggatgtcatacaaaaggaactagagaatcttgaacatttcaaaggcgtgatagggattgtgcagtcagctggtattgcggcgtttaacaacccgtatgcgacctcccaaaatgtcgaacaaatggttatcggtggtattctattagaatactatagtggcggttccttacaacgtgttttaagtgaacagcgtataaggaaatttggttgggagcgatgggctatctaaattgtaaatactttaagcattattcaccgtgcaaagcaaacgcacatggatctcaaaccttcaaatatcggtctcgacgacgatggtaatgcggttatcattgatattagcggtatcggtggaataacgtacaactgacttgccccagagatacgcggtgaactgacacgtcttctgttcgaaactcgtcgattgaatgatatttgagcctacaggaagattttgaccgaaattgcgttaaacgcagggaacagtccgtttgcaagaactctgaagtgggttgcggatcatttaaccaaagatgttgacgcccggtggactctgtctgatggattgtctcatttgaaaattgctcaatgtattgattagttgatggaagtgagctgaagcctcccctctttcggttgctctgtagtaatgactacataaattgtctctagatacggggtactctgtttaaggatgtgagctaacagaatgaccaataaagaagagggaccggagcacctctccctctttatgttggcagtcagtgaattgctggattaaggattcgggtggccaaggcaggggctgcgtgatatacgatgtaaacaagttgatattagtgcgaacacatgttcatgtactgcaggttgccttctaaagggcaaagtcgatgactgcatgtggtagtcagatatatacaatagacctattggttcgatgtctctatgtgagactactaggtatacgatcttcatccccttctcttactgttatagactgttcaaaggatgtaattgggaatactacctcgtggccagggtggcggacacaatatttctatgtataattatcactcacaaacacagaaacctaccataattttacactagtgccatatggtaagccacattgtacataaaaaaggcaatcaatatacacggtctttcagctcttcagttcctcagctcactcttttgagaattgtaacatccaaggtctgatttcgcacatcaaagcaaatactgacttatgaaaagggaccgatatatcccaagtcatcttagtctgactaatgtcctgtagatactttccattatgacgagacagagaaatgctttccgatggatagttagcatcacttgtgaggatgcacttactccccactccatagttactcctgaggagcacagaggccctggatgtatatttaaatatgattccatgatatcgtaggccaatttcaaacatagctaggtagcttcaagatagtttggttcagtccatacagatctcggcgggattcaaggttgtttgtccttggaattcaggcacattgatttgctgactcatgaccccaggtcctgacaccgccctgaaggttctgccgcatccgcggaatttttttaatcttttttttcgaggaattagaccgcaatctgcaactgcacgattcggttttgccagtttaagaatggcaccaatcaagcgcaaggggaatgcccccgaagaaaatactgcccgccagccccaaaaacgtgctaaagttggagcggaggaggtcaagagagaccataagaagtcaaacgatgctaccacatccaccgctgggaaagcttcagaactttctgtgctgcgcgatgacgagccctcattccctcgtggtggcgcaagtgttctgacaccattggaacgcaagcaaattcagattcaggccaacagagatgtcttgttcgagcagaaagaatctggaaacaagaaaactgcccagaagacaccttccaacgaattcgccgaagaaagcgacaacgatgttgaaatggaggacgaagaaacaactacgactacgaagaagtcgcgaaagaagaagtcaaaaagcaagaagtccgcagacaaggaagctgatgacaagcaaaatgttcgcatcgagggtcttagcttcaaggtacgtgctagaaaactctttcatgtcgcatcactctaacaattatagcgcattgtacccggagccatgatcctgggccaggtctcgagtatcaacgcacacgacatcggtctttcgctccccaacaaccttaccggttacgtccctctcacatccgtttcgaagggcctcgaagacagacttgagaagatgttgaacgatgaagctggtaatgacgatgccgaggacagctccgacgaggagtcctttgacttgaaggatcatttctatttgggtcaatacctgcgagcattcgttgtgtctactggcagcaacccggatgatccaaaggcaaagggcaaaaggcgaatcgagctttcagttgaccctagacaaacaaacaacggcttctcaaagtctgatcttgttgtgaactcagctgtccaagcgtccgttgtcagtgtggaagatcacggtgtggtcatggatctgggcatcgaaggctcagaactgaagggctttatgtcctccaaggagaccgatcccagtgtggattattctagcatcaaggaaggctctgttttcctttgcatggtcactggtcagaatcccagtggcaatgtcatcaagctgtcctccaacttccaaacgtctgcctcgatcaagaagtccaactacctcaattcggcacctacaatcaacactttcctccccggtaccgctgcggaaattcttcttacggaagtcacatcgaacggaatgattggaaagattatgggaatgctcgacgcaaccgttgatttggtccagtctagcatcaacggcaagattgatctggagaagaaattcaagattggtgcaaagatcaagggccgtattattgcgactttcccggctgccgagccgctcaaagtcagcttttctatgctcgaccacgtcctcaagctctcttccgatgctcgcggtcccggttcttctgatgatgcgcctgctatttccgcaatcattcctgaggtcaagatcgtaaaggttgatcaaggtctgggtgtgtatgctcggattggagaaacaaaacatatgggcttcgttcacatgtcgagactctctgatggcaaggttgaaacagtcgacgaaagttctggacctttccagctagacgctgttcacgaggcaagagtcattgggtacaactctattgataacctctacattctctcatttgagaagagcgttatcgaacagcccttccttcgcgtcgaagatgtgaacgtgggtgctattgttaaaggaaaggtcgagaagcttctgatcggtgccgatggtatgactggattgattgttaacctggctgacggaatcaccggtcttgttccttccatgcactttgcggataccatgcttcagttcccagagaagaagttccgcgaggggcagaagctttccctgaggatcctctctgtgaacctcgaaaaacgtcaaattcggttgaccctaaagaagagcttgctcaacagcgagtctgctatctggaaagactacaaagatatcactccttcggctcagtcccctggtaccattgtcaatcttcagagtcatggtgctgttgtgcagttctacggcgaggtccgtggtttccttcccgtatctgagatgagtgaagcatacatccaggatccggcccagcatttcaaactcggccaggttgtcaatgttcatgctttgagcgtggatgcagcccttggaagacttgctgtctcgtgcaaggatccctcgacattcaccgaaaagtatcgtgaggcctttgagaaccttcatcccggccaccttgttactggaatcgtctttgagaagtccaatgatgatgtgcttctcaagcttgacgagtccggcctcgttgctcgtctcgacgcttcacaactcatcgacggtcccccatcgaagcaaagctcgatgttatccaagctccgcgtcggacagaagctgaatgatcttttggtcctcagcatccaacgcgctcaccgtcttatcaaggtttctagcagggccagcttgaaaaaagctgccaagcagaagaacatcccgggccatttcgaggaagtccaagagggctcccttgtcacaggattcgtccgcaacatcacacccgacggtgtcttcgttgaattcctcggcggcctcactggcttgctccccaagcgtcttatcgaagactccaacctcgaacaacctcactacgggttggcaaaggcgcaaacgattgttgtcaatgtgcagtctgtggaccaggaattcaagcgctttatcctgagtatgaagcccgttgaggctacccaggccgctcccaagaaagcggtcaagcagactgacgagagcgttgccaaccccgtcgatgccaacatcaaaagcatgtccgatttcacatttggcagaatcgttgagtgcaaggtcgtctctatcaaggcaacccaagtcaatgttcagcttgcggataacattcacggccgcattgatgtgtccgagatattcgacgactggaaagacatcaaggatcgcaagcagcccctgcgattctttaaggccaagcagactctctctgccagaatccttggtgttcacgatgctcgtaatcataaattcctccccattagccaccgcactggaaagtaccctgtgttcgagctctctctcaagccaagctacatcaaggccgccaaccctgcccctcttaacatggagcaggttcaagtcggctcctcttggataggcttcgtcaacaatgtcgctgatgattgcctctggatcaacctgtcccccaatgtccgcggcagactgcgcttcatggatgcatcagacgacctctccttgttgactgatatggagaaaaacttccccatcggctctgctttgaaggtccaggttaccgctgttgacgctgagaagggccaccttagtctatctgccaagcaaggatacgacaagctcacatttggagatatctccgttggcatgatcttgcccggtcgcgttaccaaggtcactgagcgccaactcattatgcagcttggcgagtcacttgtcggtgcggtcaatctgattgacctcgcagatgactactccaaggccaaccctaccgtgcacaacaagaacgaggttctccgagcatgcgttatcgccgttgacaagtctaacaagaaaattaccttgtcgctgcgcccctccaaggtcatgagctcctctctgcccgtgcaagaccgtgagatctcttcgctcaaggatgttaagcctaacgatgtcattcgcggcttcgtccgacgagtcaccgattctggtctcttcgtggcagtcagtcacgatatcactgctttcgtccgtgtctctgatctttccgattcgtatctcaaggaatggaaggactccttccagccagatcaactcgtcaagggtaaggtcacgtttgttgacgccgagcaaggcaagctgcagttgagcttgaaggagtctgttctggaccccaactttaaggctcttatcacccttaaggatcttaaagttggtcagattgtcacgggcaaggtccgcaaggtggaggagttcggtgctttcattgtcgttgacgggtcttcaaacatcagcggtctttgtcaccgtagtgagatggccgagaagcgcgttgaagatgctcgcaaattgtacgacgaaggcgatgctgttaaggcgaagatcattaatatcgaccttgagtcgaagaagatctctttctcactgaaggcttcccacttccaagatgaagaggaagatgacagcgaggatgaggacagtatgagcattgacggtcttggcggtgtcgaacttacgaaggacgacagcgaagatgaggatgatgatgagtccatgggaggtgttgatgtagaggatgacagcgaggaggaggaatcagaggaggaggatggagatgtcccgatacagaagcctagcaaggccggaggtctcggtgcgagcggcttcgactggagcggcaccgccaagtccgatgctgccgcgcgctccgacagcgaagacgagggttccaaaaagaagaagaagaagaaccgcaaggccgagatccaggtggaccgcaccggcgatttggacgccaatggccctcagtctgttgccgacttcgagcgactcctcctgggtgagcccgactcctcgcttctgtggctgcagtacatggccttccagctggagctgggtgagatcgagaaggcacgcgccattgctgagcgtgctttgcgcactatcaccatgggccaggatgctgagaagctgaacatctgggttgcgctgctgaacatggagaacacatacggtgatgatgacagtctcgaggaggtcttcaagcgtgcctgccagtacaacgagccccaagagatctacgagcggatgatcagtatttacatccaatccggcaagaaccaggtatgtatccattttgaatcttacttcctacggatgttaacaattttacagaaagcaagtgatctcttctacgcggctctcaagaagaagatttcctcccagtcccccaagttcttctacaactacgccagcttcctcttcgacaccatggcctcccccgaccgtgctcgggctttgctcccacgcgcccttcagtccctccctgcccacacccacgttgagacgacctccaagttcgcccagctcgagttccgctcccccaatggagacattgagcgcggtcgtaccgtcttcgagggtctcctgtcctcattccccaagcgtattgatttgtggaacgtcctcctggacctggagatcaaggtcggcgatgcggagcaagtgcgccgtctcttcgagcgcgtccttggcctacagagtggcaagaagggccctgtcagtgtggacgctagcaagaagctcaagcctaagcaggcccgattcctgttcaagaaatggctttccttcgaggagggtctggcagctgccaatggagatgagaagatggttgaagaggttaaggcacgggctgttacctatgtcaagtctcttcaggagtaactctataaaaaagtgtgttcatctgaacctgccggtgtttggggcctgtgaatttcaatcttcaatgtttttacctgtatatagatagcgatggaaatattcaatcaatcgtcaacaatccagcacgtgtatacctcaggacatggtcgtagctttgaaagtaccacggatccaatcaccgccctcaatatcatggctgcctccagttttaagggtcggggaatctatttttgtgttttcccttctgtcttctctttacttcctcacccatgatgagccctttccgccctccccagaccaactcggtatccagtcttcatttcgatccatacagagactcactagatacggaatacccgaaggtcaatgtacatgttgactctgttgactctgagcgagtggggtatccggcccgctcatggcggcaagtctggacagccttggcttggccttcaacgtcttccatgctgtcggaaaacccagctaagcgcaagcgatcttgtcgatcgcgatacttacatggtctccggcgtgcgattatcggaatattcattatgctgtgagtttcacgaactgtgcaggccgtgtctatgcggaagaccccgctgacctatcgccgataacagaggcatcatccaatttatctccatcgcttgtggtatcgccctctcattcttcccagatgagtacgaccgtgcagttcataattggctacccagtaccgacggcacgaacacaatagacagcacgcgctggcccaccgatatttcgcgcgatatcgtccctgttggctgtcactcccacaacgattactggcgccgggtgccactgtactccgcactgcaggcgggatgcataggcgtcgaagccgatgtctggctcttcgacgatgagctctacgtcggccacaccacatcgtccctgacagagcgcctaaccctacaatctatgtacattgacccgctagtatctatcctcgagcgccagaacccaaccactagattccaccggggaggccacagccatacacatggtgtcttcgggacagaccctgcccaatcgctcatccttctaatcgacttcaaaaccgcaggcgcggcaacctggcacgctgtcatgaagcagctcgctccgctccgtgaccgcggctacctaacccacttcaacggcgacgagctcatccaaggccccatcaccgtcgtcggaacggggaatacacccttcaacctcgtcaccgaaaacaccacctatcgcgatatcttcttcgacgccccgctcgataaactcgtcggcacggaccagccagacagcagcatcccagacgcagccctcttcccgcgcacagatcttggcacagatcttggccaaggccaatctggtatgccggctgtaatcaccgcatccaccttcaacacttcgaacagcttctatgcctctgtgtctttcaaaaaggcaatcggctacccatggcccttccacttcacgcagcgccagatggacctcatccgcagccaagtgcgcattgcacaccaacatggcctgaaagtgcgctactgggcgttgccgagctggcctcgcagtctgcggaatcatatctggcgcgtgcttgcgcaggagggtgtagatattctgaatgttgatgatttggttgatgccacgaagggggtttggaatacgagggtcttcgactggtggccgtgatggctatgcattgctatatattgggtatctttcttcttgttttcttttcgcttttacttatgatgaaatatgggatttgatgaaatatgggatcatgggctggattgcctggcgttaagggtttcttatctgatttacgataccttaccttttctttggctgtgttgctttattttgtttgatagaccacttgcttcatatctatacatccaatatcgaaatgtatacgcagctttcgggatactgtactgatactgatgctgtaactaatctggcaagagacggaaaagacaacagtgccctggtgaaaacaacgcttcggttcaaattcgtcacaatcataatttcggtctctgttgcacccagtgcaggagcagtaatgctatactccgatctggaatgtgttccccaatgcccttgattgtcgatctccacttgacgccataatttatgcagtaaaatcaggtgaaaatggcatacattcaccaaagaccatgtagtggctctcgaccagcgacagcccccctaacaccgataaaccacaccaaacgtagctatccgcgggatgtcatatctcataaacagcagagcgcctcttcaccgaactcgcggataacactaccctcttcccgaatcaggccaccaagccagtgcttcgcagtctcaaaatccttggcaccgaacttgacaagcacaaagcccgcgcgcacccgcgccgccgtccatgtgacattgcccttaaagctcagcgaaggctcaggcaccgacgacggtgcatggtccgaccaattgcgactgccaatgcgcggctgcgactggaattgtttcaacatgaacgaaccgagcgcttcgaatacaggaccggagagtataagcgtgccgacgacgccgtgtgggcgcgtgcgctccgcgatgatattcagcggggttaagccgactggcgcctgcggtggcagatcgacggggttttctagaccggcatgagtggtgttgctgtaggttttatctttcttttcgacttcgagtccgtcgggtatggatgtgtcttgtaggtcctcggattcatcgtcgagaattaccgagtcgcggaggagtagtcggcgtttgcccttgtcgtcttcggcccagacttcgttgcgtccgcgccagaagtggaagtcccagtcctcgccgcgcgaggtccggccttgcgttacccaatctaggacgcagaggctgctacgctcggcgccttttgcggtggcgtctacggtgaaggtttggacttgagcgtagcggctgtgtttaaaggggacggaagggtctgggaggtagcagagggctgcttggcggccaatgttgacgtcgagtgtttgctggctcatgtcggagagagatttgtttgcgggcatttgatcgcggtggcctttgattacatttggggatgtgccgttgttatttggggttgttttgaagatcttggtgctgccttgtggcgttgttaccaccattcgtgtcctgggttcgagcgtaatggacacttcgatgtggtcacctggcaggagcccgccgccataggtgaggaggtataggtggacggggttggagggacatgtgtctgagagggcagaagaatctggggatgggacgaagccgccggtgcgcgggactagcttcaatggatatttgtaggtgagggttgtgagggtgggattgttcggtgggaggagggagaggacgaccttgccctgccctggcttcgcaatggaagactgaaagggcgagggaatgggcattgctggttttcgcatggtgatggatgtgataggttgagaaggcggagagacaagaagtgtagctagtaggtttataggcagaaatagaaaaagctatattgagcaatgaagccaggccatgctatcacagatcagaggggacgagttggtataaaaacaaaaccctggggaaatgacgattccttagtcataggcatccacttgtcaagcgggggatattcccaaatgacctctccttggctccctgatgaggatgccggagcaaaactaggacataaaataactggcagagaatgaatggttgaggtttctatgacaaagagtatctccctagacctggagggttacctcttggcaatgtacttttatgtcaattgcccaggtgatctgcacgacttgtttaactattatagcctggcagtctgggcattgaaaagaggtcatgagatacagtgtagctatggtaaatcagccatatgctttctattatattagggggtcaattttgtgatgcaattgtcgatgagaattgctatacacacacccctaaaactagctacacactcacttaaactacttcggctagggcctatcccagggagggctcatggctattctcatttctggacggaaccgaatgttcctggctagagactaagatcgagtttgaacaaggcgttgacagcgctaaaccccgcagctagggagaagaacgtttagttgactagtgaactatacagaatagacacctgatatacaagacatcaaacccctacgtagttacgtaatctaggcaccctcaggccccaaggcacgatgtcgcgtctccccccacgctgagatccggaccgttttctgcccaagtacttccgtttgattgaccttgtctcaacacggtcagagcgcgtgtcgcaaatacttgacgtctcgaattgcagacttctttcatatcttgcgccaacttctgtttgctgtaccagacctgcgcgttgcacgagcgcgcgtcccgacctgatctgtagcgacatctgccaactctgttcaaagccattgatctgctcagcagacccatctatccgatcgcatacccgtataatacactcatccgatatcatggatatcgataacccacctctatcaagccccggtggcccgtcatcgacccccgccgaagaccgacgcaaatccggtcggcagacgcgacggcccgaagtattttcgcagactacacactctgccgacgaacaagctgccggtgggaagcgcaaacggggcgaggcgcgcgaggacggcgatgaggacgcgtctgagtccgacagtgatgatattgacgacgagaccgatgaggaagaactgaaagagaagcgacgcgctgcacgccgagctagcgcgaagaaatccaaatccaaacccaagaccaagggatcgcacgcttcaaagaaacccaaggttgcaagtaacgggttagggagacagctcgccttccgaccagccaccaatggccgactgcctgctgctcgttctcggaaaccgaaagtacgaccgagtctcgcggcgggtgaacgcggattgttcggtgagtcataattatttgtgtatgcaatatcaatggctaataccagagttagccgaggtatttgggaaaggtagcaatgccgatacagtggccgctcagtggttatctcaataccagcgcgacaatgggcaggccatgcgggacctcgtcaacttcatcctacgatgcacgggtaccgatcttgagatcgacaataatgaggtggaagacattgataatgccccgggccgaatcgaagacttgcagaacctttaccaagcagaaggcatcaccgaataccctatcatctccaaagcgaagaagttcagagcgttctcggttctcctcgaggaattcactatggcactgatccaaaccttccatgcctcttccatcttgtacaccgatgacaccctgctcgagaatattcagatctggatctcttccatgtcaacatcaaaatgccgaccattccggcatacggcgacattaatctccctttcaatcatgaacgcattatgtgatattgcgcgagaggtgacgacaaccgtatctacatccaggaaacaacttgaaagtgagaagaaaaagaagacggtaaacaagggtcgcgtggaagcaattcaaagggctgtttcagagggcgaacagaaggtggagcgcttagacgagttcctacaggatgggttcgatactgtatttgtccatcgctaccgggatattgacggtcagatccgtgccgagtgtctgacagctctaggcggatggattcgcacataccgagaaatcttctttgagggccagtatttacgatacctagggtggaccctcgccgatgtcattgcgcagaccagactcgttgccttaaccgagcttttaagcctttatgagaaccgtgacaaccttgctggtttgcactcattcactgagcggtttcggcaacggattgtggagatggctattcaagatgctgatgtttcggtgcgtgtggctgcgattgagttacttaaccaccttcgcgaagccggcttactcgagccaaatgatattgatgctgtcggtcgactggtgtttgatttggacacccgaattcggaaaacagctggacgcttttttgttgccaacgttcaagatgcatacgagtcaatcaccgatgaagtgggagaggagatcgccgaattgctggctgacgacgacgaagacgactatgagtcgcctaagcactcctggatcaagtttaaatgcctcgccgagctgtttcaggcctacgacgaccaacaagccgaacagcaaccagagccattgtctcgcgacacactgctaggtgcggccgtagagtcgcgctttgctctcgcgactgaggctgtctatccctacctggaagaactgtctcagtggccatcgctggctggttatctgctttatgaccactctcaaatcaccgatgcgccatctgaagatgataccgcaggagccgtaaagaaaatgtacagaatggaagagggacaagaatctattcttctggaagtactctgtgccgcagtcaaactccgtgttctcgacatcgccaagtctgataccgacaagcgtgggcgcaagacgaaggctctagaggccaagatttccgagctccaggaggaactttctcacaaccttgcgcagatcatccctgggcttctcaataagtttggatccacaccggaagctgcttctgtcgttctgcgactagaacaccttgtggacctgaacacaatccaggatctccaaaaagacgctacggcttatacctcgctgctcagcgatatcaacaagcagtttttgactcattcggatcaagatgttctggccgaagctagtgtggctttcttgcatgccaagggctccgaggagatgcgagaggcgctagagagcaaggttcaagagctgtgggatgatatggtagaggcactggctgccttgtctcggaagaaggaggtccaggaaggtggctcaatatctgatcccactctcaccaacctgaccaacactgtctctcgaatttcgaacctcgccggtatcaccgattgtgcctccattctcgaaactgtccctaattcaagatcgcaatccaagaaagaccacaatgaagccccattcaacaccctcattcatcttgccgaacgtggtctgcgcatcgaagatgacgatgaggataccgctaaggcagagaacgaactggtctcaagcagtatccggtcgttgcttttctatttcatgtggaaggtgcaggcactgtccacagccttgaacgatggaaaggcctccttcagcacatcctacttcgaagcactgacaaagagccgcgaaacgttcgctatattgctcgtcaacatcatggaaacgcgccctgggctggatgaccttcgcttcacagcaactacaacatacctagacctacagacgctcttcagcactctccggaacatcggccaagccaacggcaatgacgaagacgtcctgtttcaaacacaaggcctagtccatgaaatcgaacccgacacccaagccctcatcaccaagatccacggaatagctgagcgcacatccgccaagaaatcaaggctcaatatcgagcccgcagacgacgacgccccagcctcggaagacgagctcgactccgaagatgaagccagcgactccgaagacgaagtagtcatcaacgaccgcctccgcagtagcattgtagccgaacagcgcctctgcgagctgacaggcaagctcgtcctcgccatcatcgcccgcatcatcgacgcctccggctctaagcgcggcgccctgaagaagcgtctccttcgtcataagaccgccctcggccataattaccgagaggtcctatcttatttggaagagcgtaagccccgcagtacgccccgcgccaaggggaaaaagcctgccaagtctgctgcttctcctgccaagggcttcaagtctgctgagcatattgatgatgacgatgagcacgaccatcctgagcctgttgaggaagatgaagatgaggacctgcgtgcgcgcggacttgtcgaggatgatgttgaacatgagaatgggcacgaggacgaggaacttactcccacgcctgaggccgatgaggatgaggtgatgggtgactgatctggtctgtcttatttgacgttaatgtgtgcctgaacaaaatgatatttcttcgctgtcgttcattgcttgttacttttttttcttgttacttttttttcgctctctctactttcttctctctctcttttatggattatggctgaattgactgtacctctcttctttgctctcgtttgcgtggatatggagttattttcaacctgtatcttatacacttcccctgatctttactttgctgctactttgctgacttgatctcaatctattcccctctggtctctgctattttttgaaatcttgatatggaattgtggtatagtaaaatggatgtaactaagtctgttgctatcattggtacatttagactctgattgtacattattttcactgcctgagggcttcgtattctaacattgaaggcttgcaagtctagcatcagttcgtctcctcccgagaacataaaatacgaagataagttgtctggggaagataggaatatcctgggatacaattacgactacaggaagaaaaggtaggtcaagtgaaatctggcattttttcctggcgaattgcaaagcgtaccacgagaatagtgcaataacattttcagaggcatgattcgagcagattatgagcgtggtacgagcaagatgtgctgccacagccctgttgtcagcaagcgaggacgtgcccgcgcaggagaccaatgccccgtcaaggaacaccatagtcagaggacattaacgtaactggagagagaaaaccgatcctgcaaacaaatgcgcctgtgtatgaggatgctaaaggggtgggggaggggatacatgatggtgaatcttgtttatcgtgaaatcaaaaaaaaaaaaaaaaagaggggggnnnnnnnnnnnnnnnnnnnnnnnnnnnnnnnnnnnnnnnnnnnnnnnnnnnnnnnnnnnnnnnnnnnnnnnnnnnnnnnnnnnnnnnnnnnnnnnnnnnnnnnnnnnnnnnnnnnnnnnnnnnnnnnnnnnnnnnnnnnnnnnnnnnnnnnnnnnnnnnnnnnnnnnnnnnnnnnnnnnnnnnnnnnnnnnnnnnnnnnnnnnnnnnnnnnnnnnnnnnnnnnnnnnnnnnnnnnnnnnnnnnnnnnnnntgaaatgcgtgacaagagaagatgagggaatcaaatgagcaccataaactgtttagacgcaacgccagaccgagaagtagcttggtcgaagcgcacgagaggcgtcgaggctgtatgcgagcaacctggcctctcggtagccagtggtgcccgacccatgcgaggatacgctggacgcagcttcgacgtttgggtttgaaagaagatgaagatacaaggattggcatagtgcacgaggaaaagacaagtctttacatatccatggtatcaccgccgttgccgaagttgaagccaccaggttgctgctggccagtgccgagagcaaatccagtctgggtctgttggggagcaagttcctcgatatcgccaccggcctcatcctcgtcagagaagtacttctcgataatgttgtaggccttcatgtagatctcctcgttggcgttgttctggcaatcgtgaatcttctccatgccaccggcctcttcgatgaagagagcgtagcggttgacacgagcctcaccgggctggccagcctccttgtccatatctccgaccttgaggatgttctcgagaccgtcgagagcgacctggatgatcttattgtcagggcaggccaggagatcgcacaggggtttgatgcagccttgagaaacaaggtagcggatctgatcgggcttctggagaccaccggaagtagcgttagagatagcccagcaagcctccttgcgggtcttgaagtcaccattggcaagaaggttgataaggggagcaatgatgccagcgtcgatgaccgcctgaatctggctggagttaccggcagtgacgttggagatggtccagcaagcttccttgcggataccatccttggtggagctcaggagggagagcagagcaggaagagagccacagttaatgatcacctgggtctggacgtcatcaccagtgacaatgttacccacggaacggagagcgggagtctggacagaggtagaggcgtgcataaggagctccaccaggcgacgggggataccggcctcgataacggcctgaatcttgtcgttggcaccatcggacaagtaagagatagcccagcaagcgtcaatcaggacctcgtcatccagcatgtagatgagcttggcaaggactggaagggcgggggcaatagtgttccagtcaggctggggagtcttgccacggcagaagttgctaagagtccaagtagcgttgcggagcatgctcagcttgcggccatcgttgatgaggttaagaagcgggcgcagggcaccggcaccgaggacaaagtcacggcagtgagggctgtcaccagcaatgtttccgagggcccaaacggcctgttcacgaacatcgggctcagggctgctaagcaactcgacgaagatggggacggcaccagcttcaatgacgacctgggtctgctgggcggaaccggaagcaatgttggtcaaagcccaggcagactcaaactgaaccagggtgtggggtgagcgaaggaactcgacgaaacgggctacgacaccggtctcaataacacgctcgataggggggttgcgctccttggaaagcaatttgcggaacttggtggtggcctggatctgttcctcaacctgatctgagaaaactcccttcaccatctggggaagctcgacgttgagctgaataaatcattatgttagcttggtaattttcacgatgttttttttttattgcagtggggtcaagtcagaggggtcttcgtgggccatggcaacagggcggtgaaaaaaaatccttgttgatgatcgcatcatgaaaacaaagaattcactcagggcccataaaggtggtgaccacaccatgagcccgtagaaatccaaaggaggatatagaatagaacagatttcaaaggatcaaagaaaaattgaaagacctacctcactctcaatagcactggcctcatcatcactctcagtggcggcagccatgccaccaacaccgattctaccgtcctgagtttggataccacgtctcttggctaagttctcatcacgcttagccttgcgaatctcgacctgctgttcttcacggcggcggcggagctcatcgggcttgaactggttcttggccttgaactgtgtgcggcgatgctcgggaatatagcgttccgccatgatgaaaatggaaacaggaaaaactaagcgcgccgcggtgatcgattatgtagtatgtgaggttgagtgggcgcgcggggagatggacggagagtaggaagaaggaagagggatctgatgtgggggaagaagacttctgtgggaggggaaacgatgctatcacgtgattactcattcgacgtactcccacgacaataagctcgtcctccctgagctcttagaattccacttattttggtgcttatttatgacaattgctctagttatgacggatgtgcattgacagaaacgtgcatttttttctgagctagtttgtgatatctcaccgggagcttgcaggacatcccatcgacaaaagatatggcttcaggtgatctagtggacattaccactgcttgctcttcacaagggactttcaatgtcataggtgtggtaattgacaagctaccactctttcggaccagaggctcgtcggcatgcatcaccttcacgataaaagactccaattttgatgcaccaggctggcaaggtggtcttaaagtcagatatttcaatgatgatgagagttatcttcctaatgtcgagctcaaagatgtaatcctattacgaaacctcctggtgagtttatttacatgagtgcagcagcatggtaagctgacaggattcaggtgcaaatttaccagaacaaaccaacagggtttgtttctcagagatcccatgtgtcatgggctattttccgaccagagccaagctcgagttccagtccgttcattaccagcggtcccattcctttcgagccgagtctgaaggaaaaggatcaggcacactcgctcctggatagtgtatttgccgaagcaatccctgtgcaacaacccaccccgcacagtatacccgcctttcagcagtcttctcatgttcaggcttccgttccagccgcaaaatctggaggcctaccgtatatccctattcagtttgcgacggttcgccaactttgccagttacttggccaagttgtgaacctcaagacttatgacagtgaaaaatgtatgctggacttgactgatttcactgagaatgaggggcttgccaactacaaaaaacccggagaaggtgacgatgaatcaggtcctgagggcgaccgatttaattacatacagaagacaaagaactggtcaggcccatggggtaaatttaccatccgagtgactttatgggagccgcatgccagctatgctcgagaacacctcaagccaggtgacatcgttctattaacctatgtccatatcaaggaacgccgtggtggattggaagctgtcgttcatgaagacaaactattcccggagaagattcatgtcaggaagatgaatggtagcaatgatgagcgtgtacgagaattgatgaaccgccggacagaatactggaagatccacggtgaacccaaggcagataccaaaaaggccaagaaaaagaacaagagagtcgagcagaaaagggaggcccggaaagaagaaggccaactgaccatgccagcagcatcacgaatcaagttgaatcaacatggtgagttgattgtgttcctaagagaagcatattggctgataaatgtttagtcaaaacaaaaaattacacagtgcctactttccctctggagaagatcttattggcggagactcatacaaacaatgctccggggggcattgtctataagcttcccttccaaaacgtcaattatcactctcaggtccgggtagttgactttttccccccaaagatagaagactttacggttcaaacgaccaacgctcccttgttcggcaatcaggaaagtgccacggagtctcaacttggctgggaatggcggttttgccttcttgtggagggggttgagcccaaacctcccaaacaacagccccgaggaatgatgaagctctatgtgtgcgggcaagatggtgattttcttcttgacgattatgcattcaacctccgcgacaatccacggagactggaagcgataaaagagaagcttttcctcttatggggcaatctcgaggaggagaagtcgaaagccatagcttctggtcaacagagttgggggccagtgaagtcgtgcccattcgagtgctgcatcaaggaatatggtgttcactgcacccatgccaaagaccccaatgtgatggatgtcgacggcgaggtgtgcacctatcctgattgttttggatgggagagacgatttgccatgttcggcacgactatccacacatgaattctacaatccccaggtcttgtggaaaaaaaatgtatccctaaataaagcttgtatggattgatcctttgtactaatacaatttaacatttttaatcaatagatggttgcgcctggaacctttttttttcacccgcatagaaaggaagaaaaaaacaacgttgaattctcaatgcctgtatagcaagcctgctcccatgcaccgtccataactcccgaatgatcgaaattctgataatgtcatggatgcttcttttgaaccttttccccgtgaaactcacactgaactcaatagacaatattttaggaccttgtttcaagaaaggttcagatcggctgagatgagcataagattgcgagatggccgctcaaattttcgtaactttgacgatgttcgtgtcgatgccatgcgccacgggctcaaagcggcagctgtcgcctcggaagcaagtctttttaccaggttcgctctgaggacaacgatgaccatagatacactcgacgtcatcacattctagaccaaagcgacaaggtgtcatgcgggcaatggctgacaagatgtgcagatcttggcgtgacaatttgcgatcatggtcatgatagcaattctcttcattaggacattcaccgagcaagaaatgataattgcaaagcttgagcttcttcagtttgttaagatcatcgcgaggaatgctcttgaagtcgagccgatcaacacgctggccatatttattccgttccacggtctttgggggggatgcaccaggcaccttggaccgaacgacctggaaatcagaagactcgggtttatttgtcatcgaggccaatggagcacccaaatttgacacactggtactggtagaggttcgtgacaaagcaggtgtttggaattgctgggtcggcgatggtgtgagcaaagtccgcgaagggattgcgcttttccaaggagcagcccaagacggtgcactcgttgcactcggtacactcggtgcggtcaatgtaattggagcaatctttgtggtgcggaaaacatccgggaactgggtgatgcgatagtcctgctctcggaaataatcaaattccttctcgagtggaagaccctcaaccagcgagactcggcccttataattcgcgccagaaatgagttctgtcaatgaccgagcatattcttcattggagggacagcccaagaagagctggtggcaatggcagttgtataagtaaagcttaaaagcctctggaggaagagaatcagcaatggtatctttatgtcaggttgtaccacatacccttgattttatcgtgcgctttgtttttgccagttccaacgtccacaatttcgaagaacgatgcactctcattgaatccacgaataaactcattgattgtggaggcctctagggcgattccgccccggatgtaagtctccataagtcccttcacattaagatagatcttggtcattatcttcggctcggtgatcgtggaaagaattgttgtaacgtagctctggagagatttccagagctgcttggccgcattgcgtccaccctgttcccctagttgcagaaattcatctttgaatattattccttcgccgtctaaaagcaacacgacgaatggttcacggtcctagaaggaaacaaaatatgtgtcagcctgagcttagacaaggcgtccacagctgtgctcaccatcattttcttgacaactgatatctggtccatcagctccatttcatgcacctgaacctcacgattgaaccgggtttcgcgttcatggtcgagtttctcttgttgaaaggaattctctagggtggtcacacgttgaagaagttcctatcgcgagtcttgttagagtgaataggggaccaatggaggaattggttggtacctcaatgaagtcattcttctgctggtccagagcgcttagctgacgatagcgctctaaataagcttgagtcgccatttttgtagattgatgagtatcgtttgcagatctggaaatggttggaattgcgaaaaggatgaatgcgacaaaagataaggaagaaagtaaaggaagggagagaagcaagtttcaagtctgatcaaagccaacagggaaattccagtgggcaggcgcttgcaggaggtgacaatctacaaagcgcgtaaagtgttagaatcagcggtaatcaccaattatcagtggccacctcactttattaaattaattgatatagagagagaaatttatagtccgtcgtctttgcttcaaataaaaaatcaatctaagaccgcgggtgccatctggctgagtcagcccccggttttgcatacgtggagccaaatattccccttcacctgatcttgactttgacctttcccctgtttatctcttctctttctctttcttttctctcttccggtttcaagatgactcgctttggtttcctctctttggctctactctctctccaggccttcattggcaccggctttgctgctgtatgtgtttcgtcttgatttgcttcgggaaccatgtcgcatgactcaattgactaattgtttggggttgaactttcaggatactgagaatgctgaagcagaggctcccactctggctgtctcagcacacgcctctttccctgcttccgagatcttcggtatcaagcttgtcaacggtcaccctacccaggcgctgatcgccatctccaacgatgagccgaatcctatcacggtgaactttgtcgggggtagccttcgaaacgctgaagaccaggcgcaagttgtccgcaacttgactgctactcgttatgccattgagattcccgctggcgagaaggagacaatcagctacagcttcgccactgagatgcacccccaggatctccagatgacactttctgccatcatttcagacagtgagggccgcttggttcctatcgttgcccacaatggcaccgttagcatcgtggaggcggataccagcatcttcgacccccagatgtaggacacccccctttacccttggtgtgagagcaacgaggctaacaattacaatcagcattttcctttatttcttcctactggcctgtgtctctggcactggttacttcttctataccgtttgggtcgctccctacttcccccagaagcgcaagtccgcaaagaccagcgagaagcgcacacagggtggctcaaagcgcgctgagaccccagtcacggaggagacttccaccggcgctgcagtttcttctaccagcgcctacaatgctgattggattccctctcaccacatcaaccgccccgaggcccgcaaagtcaagggtcgctcgaaggcccgtgcgtgaatatactcacgacagtcatatcacgaatggaggaaggaaacaatccttttcaatgtgtaccattgtcgggggttttgtctagtgtgagggcggcattagccacggtgctggaaatgcaccctgctgcttgtcacaaaggacatgtatatctaccaaatagaagattttggcccagtttagcttccacggacgccaaacaggatcacttttggagagttcaatccattgtataccacgctgtgcctgttttggcagtactggtatctcacagtttcttccattctttaaattccccctccagatgttgcttcaattccgcaaaccgattcccaaaccccctaccacagcgccagcaagcaaagtctcgttttaggtactcctcttccgtcggattccgtcgcacatcatcttccgccagcgggaagtcctcgattggcacgaagaatggtgtcgaaaagctattgtagtgtttccggtgcttcaagcgctcgctatacctatccaccgataatacatggacatgcaagtggttcatagatggaactgcatgcaccccaaccataatctcctgttcccagtcccgaccccgcggtagctcgtcgggcggcggatcggcgctcagtgccgtctgtctcgcctgctcctgcgcagagtccttcccatatttgcgtcgcagctcgctcgctgccagcttgcgaagtgttcgagtttcggccctcacttttgctaggaagtcggcatcctcaaatgcatcaaatgggtgcattcgtgttttggtctggtcgcgggggagaaggaggaggtgcaacgatgactttgggaacatgtcgtggatcgccacaaaatcgtcattgtggtagaccacgacatcgggagcatatttctcaggctttgtgatgtaggtgcctagtccatcgcgaacaccaaatgcagtcctgcccttggccgcattgcgatcagacggggttttagtcgcgtgtttggattgcttgcttttaggagccaggagttcggtaactgtcaaaccgatatgtcagtcaagtatttttcagtggtacgtctctcggtctttacaggcattcctcttttctgacgtcccagtttgcttctttgggtcagctttggtcggattggagtggtccccggacatggttggtgtggaagtttgactcgtggtcacacaatatatgttagctacagcattgcctttgagcaacaaatccaaatctcacatcggtagaccgagtagtaagagtacaagacatgtgttgggagttaagtctcccatggtcgctgcgctcttccgtatgctccccgcaatcccaaagcggtttagtgcgggtcgctcttttgcttgaagctccaaaaattatctttcgcgcaaacactcaccacgcacaaaatgccacctaagaagaaaggcgatggtaaaggtggccacaagccgggtacaaaacaagccaaagctgtggcagagaaagcggccgacgaagtgaagaagcaagtgccggaggagcccaagaaaccatccgtgaaggatgtcattggcggcgcatcatggacagggaagctaccggtcaatatgttggcagagcactgtcaaaagcaaaagtgggaaaaacctgagtacaacatggtaatcaacttcccatggcactcgtcgcctgtttacaaacacatatatcaaaccagatgctgataggttgcgacaattgcagatcaaaactgccgacggctttgtatcatccgtcacaatgaagaaaatagatcccaagaccaaggaattaatcgtgatcccaccgataaagctccctccctcccataagcaacttgctgggcagccgacagccctcgaagcgcgccatttcgctgcagcgtttgctctgttccgagtgtgcaatatgcgcaatattcatatgatgatgcctccaacttataagaaattgtggaaggaggactttggagaaattaaagcagcagaaactcgggaaggcaagggctggatgtacgaggcagatccattcttagccaagcaagagagagagagcgcggccgccgatttggcaaagaagcgagcggatcgtgaaagagcccaggcaaaggagaaggcctcaaatgcggaattaggactaggaaatggggatgccaggagtaaacgtatctggtcacaagcgcccaaggtggatatgggcacacggattcgacgagatatcgaaggccttttgcggcaacatacagtttggaacccatatggcgtgaagatcccggaaaccgaaaagaaaaccatcgcggacgaattcaccggtctagggtttcgtcgcagccatgtggaagaagctacagcggaatgcaaagaccgcgaagaggtcttggagtggcttctcatctatgttcctgatgatgacctcccacgatggtctctgccggaaggatattcggctggagtcagtcttggttctggtgatctcgcccgtgagggcaaagtcaaacggctggcatctgttggctatccagccgacatgtgctctcaaattttggacaggaagcacggcgacgaattggccgctgctgagcatctgcaaggcactttgacccatggaactcaattctcggccccgtcagtagccgacgaagacgaggaagcttgggcagaagaagcgactacgttagaggctatcttcggggaacgttatcaccgcatatcagccaggatctgcgagatcaacagcgaggcatcggatattccacaaaacacgattttccgcttccaaaagccctccgcccactatccaaccacacctcctgttatatcaatccaggccaagggcgtcccagcctatatacgtcttagtgcgatccgtcgggcagtgcagtatgccgaggaaaactttacgggtgaatctatgattttcaacattatggattggctggaggtcaatctgccgagcatcatggagaacccgggtaaattgcgggagatttccgctgtgacggcttcgtcggtagctgagacccaccaaattcctgtgcgttcgagtaggaagaatcgcagaggcattgactggaagattgactcggaacgaagcttggcgatccgtgatgcttgggaggccaaacaagataccgcgccgcagatcgagatgaatcggaaaagaaaagcacttcctgcatggaatatccaacatgaaataatacactctatcaactccaaccaggtgactatcatctcgggtgagactggtagtggtaaaagtacacaatccgtacagtttgtgctggacgacatgatccagcgaggactgggagctgctgccaacatcatctgcacgcagccacgacgaatctcggccctgggtcttgccgacagagttagcgatgagcggtgcgcagtagtcggtgatgaagttggatatgtgatccgaggcgagtcgaaagccaaacctggctcaacaaagatcacgtttgtgactactggtgtcttgctgcgccggatgcaatccggtggcgatgcggatggcaatgtcgcaagctccctcgcggacgtatcgcacgtggtggtcgatgaggtccacgagcgaagtctagatacagacttcttattggcgctgctgagggatgttctaaattaccgcaaggacctgaaagtcattctcatgagtgccaccctcgatgctggtatcttcatgagatactttggcagtcagagatccgttggactggtgaacattcctggccgaacattccctgtcgaagactactacctggatgacgttatccggtacacatcatttgcgccagaacttgccgagggctacgaggacgaggaagaaccccctcggggagaagaaacacttggcaaagccctgcggagcttgggcatgggaatcaattatgatttgatcgcagcgactgtcgaatacatcgattctcagctaggaaaccagccaggaggcatcttaatcttcctccctggtacattggagattgataggtgtctgaaggcagtcagtaggatccccgatatgcatcctctgccattacatgcctccttgcttccagccgaacaacgacgagtattccagagcgcgccaagaggaaagcgaaaggttattgccgctacaaacgtcgcggagacctcaatcacaatcgaggatgttgtcgccgtcattgacaccggtcgagtcaaggaaacgagctacgacccaaaggataacatggtccgtctccaagaagtatgggcatcacaagccgcttgcaaacagcgtcgtgggcgagcaggtcgtgtccgtgcaggtatctgctataagctctacacccgcaaagccgaagcaaatatggcccaacgaccagacccagagatccgccgtgttcccctggagcagctgtgtctgtctgtgaaatccatgaaaggcattgacgacgtcgccaccttcctagccaacaccattactccaccggagagcatagccgttgaaggcgcactaagcttcttgcatcgcgtaggcgctctagaccacgacagactcacagcactgggccgctacctctccatgatccccgcggatcttcgctgcgccaagctcatgatctacggctccatcttcggctgcatggaaccctgcctcacaatcgcagccatgctaacagtcaaaagtcccttcgtctcaccacgtgagaaacgcgacgaagctaacgccgccaaagcaaccttctctcgcccgggtgacggtgacctcctcaccgacctctcagcataccaagcctggtccgagcgaactcgcgctcagggcggctactggggcacccagtcgtggtgtgccgccaacttcctctcccaccagacgctgcgcgatatctcctccaaccgcgcgcagttcattacctcgctcaaagacgcaggcgtcctgccaatccagtattccgatgcgtcggcttcggcctggaatcgcaacgcaaccaatcgcaacttgatccgcgcccttgttgctggagccttccaacctcaggtcgcgcagatctcattcccggataagaagttcgccagctcggttactggtaccgtcgaggtggatccggatgctcgcactatcaagtacttcaatcaggagaacggccgtgtcttcattcaccccagctccatcctcttctctgcggctggctatcctagtgccgcggcatatctcagttactttaccaagatggctaccagcaaggtcttcatccgcgacctcacccgtgggttacttctcttcctttcctcggggtatcaccttctaaccttcttttttcttacttgcagctttcaactcgtactccctccttctattctgcggctctatagaactcgacactgtgggtcgtggactagttgtagacggctggctccgtctacgcggctgggcccggatcggcgtacttgtttcgcggcttcgcaccatgctagatgaggctcttacggagcggtttgataatccttcggttgtctccaatggcagcagtcttgctgatagagtgattgaggctgtcaaaaagttgattgagtttaatggacttgatcaataattcgcattggcgggttccgaggttgaaaatacatacagcggatatatcatcttagatgggaaaagaatcgaaatgatttacgagacatccatggttaaaaaataatcatctatacggtttaggctttataccatcttacgccgccttatacttgtcgcaaggtgataagtccggcatgtgtatgtatactctgtactctacagtcgaccgctcgacatactaatggacaatcctccttccaacggcatgcagatcatggggacctagctaaacatagcttcaaaatacttctcgggacttaaagtgagacagacagacttctgtctcctacaaagataaccgaagacctccgcttcccttattatggttcacaaattctacctcggaagatcgaaagctactccaacaacttcttccgaacatccggattacgctgaccacccgcaccttttagagaagttgatgccttcttctattgggcactgatggatccatccaatctcgctagagtccttatcggtggagagcccttacacccagttgaaggcgttgcttgcaaagttctttcgcgggaaatccgggatcggcttgttgcctatgtgtcgaaaaggaatgagtttcagagtatctatatttattgtcttgatatcgaagaagaaaaggttgaaggtgttgccttgagtagagttacggaatgggagcttcagcctagctggttacagagcagcatttggaaacccaaagtcttgcaagttcacattatctgacagctaagttcttttccggctaagagaacagacctgaagactggatgtcgtacttggaagtgtgtagttaccttgatgtagttatagaaatgggacgtcatattcgactattactagtacagtacaacatacagagtggcgcagagccagtcaggtgacttgtgtagatagagagtgtatcaacggtccccattccccaggggaaaaaaaacgaaaaaaggcggttagaacgcccggagagaaagagatcatcgtcaacgccttccgatcatttactctcatgttcggaaaatgatggcgtcaagtcatgtcgtcgtcagcccagtagagctgggaagaaacaaatccacgaagaaaacaaatgacagaatgaaggagatggaaaagactggaataacacgcaaacgccatgcataaaaaaccgattcgcctgttcacccatgttgaccgaaagaaaaacgagaaataagtttagagatcgtgaatggtggggagtaccagcaatactgaaagccagcttagcattgtatctgcacaccaccggggtattagtttgaggcaaggattagtagtttgcatagccgtccaagcgatctggatcattgagatcagagggctcgggcaaaacaaagtcggaggcaagcccagtttcgacaaagatcgaggcatgcttgaaacgacgatccgaatacttttcaaatatggcggcgtggtggcggcgagggttctcacagcattccatcagtgtgacgagtactggaatcagctgggaataaagataaccactgtaaaatgcgtgtgccggtgtctgattttgaatgttagcaatatgataattgaatgggttggagaagaaaacgtacccagttgcccttgttaagcagcatgcgagacaggcaatgggctccagcagcaataaagctagggggagtgcagacaaagcgctcatccataatagccagctcaaggaagtatttggcaacagtacgagtttcaaggtcgtattcatcagccttgctaatacggcgaaggaaactcataggaccaggccatccaagatcaaagtcgaggatggtgagcatgaaccgttctgccttcagaatctcgtcgacggaatatccaccgtcaaccatgtaaacgatctcttgcacggacggggctgtaatctcttcgaattttgcagcaatgaagattgctgtcgccccaacaagctgcaatttgcccatagaaactaccttgtacgacaggaaacggtcgatgtagtttactgtgaggaacagagtttcagggagcaagttaaagcgcccatgaacttgaacaagccagtccatcaaaaccgcgcgcatggaccactggagttcgctttgacgggccatgtaatcgggaaccggaagcatctcgatctacagacatggttagttcaagctggttatcaggcattgggagagtaaaacatacctctttctttcttagatgaaggaaaatttcatcgccatactccgcgaccatggtcgtatctaaaagttcctcctcaatatcttctggtgtctgttcgctttcgacgatgtctttcgcccggaacatctcacgagtggtcacattgctcatgcatggataaatgacggtggttccgtcggcgttatccccacggaaggagtagaagggtgcaacattgtactcggtatcatccccatcccattcctcgggctcagatacagccggcacgggttccttgacgtatgtgtatgtgtactctttcagatcttcggtctcggaaacggtggcatcagactccacgaggctggcggtatcaacgttcagcacgtttgaaggccgcactacaatactattcaaatgacgccctttctccactcccttgtggctggtcttggcatctgtgtctgtgttggtttccttggatgcagttttctcgggaacggtatgcaattggtctttgaatacggcgttgtttcgcttcgatttatacgccggttgggccttaccggcggggttcataggctttgttgtggcaacgctttcaataacacccttagttcctgccaaggtcatgcgacgttgggctggctgggacagtccaggagccttaacctcaactagagcaggctttccaccaacggcggagtcatcccgactagctcggttcatatccttggtgttgctaacatcgacgaatgcgcgtcggccagcattgttctgggccatcatactcagagcggggctcgatttgttgcgctggtggatgaccttatgattttgatgcagagacgaagggggcacgttctcatccccaacgactcggaagcgctgtggctgtaacatcagttagcatcaatatctccaagttctccaagtgtggtttaggatgaagcaactctagaccaaaagtgggcgaatacacgacaatgcgacaacgcggcgccgctttacgcgattgacgcgtaggtacagaagaatcgggcaaaccagaccataaacatagagctgacttacctttgcatccatgatcgtgaacaatgaagttgcaagacgtgagtgtcgagtctaccttgaagttggtagagagatgttgtttactttttgctcagttggggggagcggagttgcccggcgtgattggccagcccaggcaaaataaacagtcgataggacccgctcactcgttccttcccgatctagcccagtttgtcacttgaatgttacctaggcagaataggtaactttatagaactgactgaacaagtgaatgagcgagaatggaagtgacaaccgtgaagaagggagggttgtcccttgttcctaaagatgtgccttgttgacaatgcacgctattcctaaattggaggttacggtggcgcacgccatcctactgtgcaaactgccctgcgactgttatgcacgcctgtgtcatcatatgtatgctaggctcaaagtttatggaagttttgattaaataatatagagaacatcgaagggaagatctgagtttattttacctttatttgagccctatttgccggtttctcagtcgaatgtctagactagataggtctatcaacctatagttattgaaggcaaatttgcaagataaataccatggtacctctaattagcttctggggtatcaattttatacattgttcatcatcctagtgagaatatgtacattgtaatcatgaccttgtcaaattgatatcaacctttcaaggttccatggttacaactttccgaggtcgaggactcgggacgttgatagaatgttaaatgtttgttctgtttgtctatggtttgcattgtttggtacatctttgacgtcattaaccttatcggcgcgtctcctgcgacgtctgtcgaacatcgtttttgattaaagaaccacgaaaacaagattagatattactaaaaagttatctccaagtacattcaatagtaatgcatagttaccgacaataatatcccaaaataattcatgtttgcgagtacaatcgccattttatatcataatctagatctgacgcgctatctacacgagaccacgtgagagctacaccgccgtcacaagaggtgggacacccggaatgaagcggttcctgtttggcagctttgtgctcaaccgaaacccactcctatcattgcgacggtcgtcggcttttccagtctcgccaagtggtgcggggcttcagatcagaggcaatgagcagtttcggagtaaattatagacagtagccacgttctcggatccgatgatcttcatcgtcaacatatccaaaggaccttttgcgcccagtctctcagcatcaccgcctgactccaccaagcagaaatgttccccccttttcatcgcctattttcttgagaaatcactaaaactgtgcaatcacggatttgcgatgtcccgatctcacttttgtagccaggttccaaggagaaaggaatgatctgtaacgccgatgcgggattccctttttaaccttcttacataggtccgaggaggggtaaatccatgttgcagatcatgcgagacaactccagagagtcatgcgatattatgaaagagaatattctgggtattgaaacggtttggttctttcggtgatatcctttcggctgagtataaatatctaggtccggtcctctaggcggatcaacaaaacgtccataaaccaccctaccctagcgattttgctattaaaccacattataagtgtcgcgatatcttgtattttccaattcgcatagtaaatgagcaatgcgacaagggtgatggtgggaaaatgactggacaatgtcaattctgtccaagcgcacacctccacaacagaccaaaaaaaggtatgggttgctacgtggtcacgctaggaactagctgcaagcccataaatctattgggcgctattcctttatcttattttacacccttagccctcgataccctagatagttacttgtagcgatagttagaggtacccaagctacttgctttgtgtgaagcgctgcatcctcccctccccaacagtcttaggtagcccacactcgcttacacttcatccctcaagactcaaagatcggattatattctcaatttcgtacataatatacaagaaggagggttagacaaagtgttccgtcactcggcgcaatggcatccggcttgcgacagcttttgcgcctttgcgaaaagatacagcattgggatggcttcacacatagttatttttttcgatgcatagaatagttgcaaatcaaatgaagattttatatatattcattaatgccatgggatgtgatggctgcatcgatgggcgccggaagcgcaaatcgccatgtcaccgactcaggcaggccgttttctcgctttaggtgaaaccatcgtacgcacccacctcaaccttcttccttccatccaacaacccctcgaacaaatcgccatcagcgctgtcaacagtattgggtatgtgtctctactctcgttcgatctcacttttcactcccctgaccccgttttaatcctggagatgccaccactgacatagcctcagcgcttcgtagaattgacaatcccctctcgacctcgaccgaacccatccttcgacccttcgccctgtcttggacaatccaggtatctgcgatactggaagtctctgtttgagttgaattaggtgtgttgaaatatctctccattcttctccgggtcatctcgcttgcttcccccaagcccgcctccaaggtcggccggactcggttagcgacacatccatccatcatcttccaagacacaagccatccttattgtatattcgagcatttggaaccccattgtgttaacctctatggtctgttttccttcaggttgcccacatttacccttctgagtcgcttccggctcttgcgactgcagattcccctcccacctccatcgaaggttttgcttcgacggtctctatatttctatatttctatacatcaagaccgggggtggtccatccaccagcctgatcgtttgaattcaacaattgtggtaggtttgatggattcttccctctacacctgcccttcctctgtgtcttgccatggatcacattcccgccctctacggcacacaagcagtgggttgatgcagaatttggtatagcagtggagtattactcaatttggaacactttgatatgcaaccggttcagcatgaagggctttctggcctggtcgagcagccgggtctggcagactctgccaatgtagctcgagacctgtcgctgaaaggcccagcacccaagaatatcgcctttgagttacttcttgatgagaactccaaagtccgagctcgtattccgatgcgcgttcaaatctatccccatgataccacggactcgatcgtcacaacggtcaaaaatttctatggaatatatgacggtactgccagtggggtcagcttcgaggatgaacatgggaccaccctcatcgcaaggtacgagaatctcaagaacaatcggactgtatacgtgcgagtcattcccattcaaccatatggggatcacttctataacgggttcaatgtcgagcctcgcaagcgacccagtctggcggagcctttccagatgttagatggaacgtcgccggcgttagatcagccaggacggccatcctctcggcttgcgagaaagcgcagcacctctccgtcgaaccggagtctccgcagcgcttctcagcacaagcctccctcccgcgcgggcaacaaaagccgggcctcgagcacccatggagctttccatgatgatgatgactacagcgataccgagagcgcttatgctcgcagggctcgcaatgagctctttgctagctcggatatcagcatggagaatatactacaagatggtcgtcgcaaacgacccaagttcgatagctctgtgagtgactcatacgagagggtttttctctatcaaagactgtcgttaatcaatatgttccccttaggagctccccctgtttgttcctccccaagtgccccttactacctccacttcttccatctctccccagcgtcgatcgattggccaggatggcgctgggtcgcctttcgcacgcccaccgcaacccccgtatagttatcaacatgcgcttccatcgccgcagagctatggccacagcgaatatggtgtccactcggggcgcaatacgatttatgcgactcccgtggttccagaccatggaaatcgcatgcgcgacacgggagcctataacagctcggctagccgagtgagtggtccaggtatattgcccacacctgaccccactattgcaagctgcatctccgatgaggatgtggcgatgcaattgatacgcttgggcgatgcgtccaatttctctcacggacgcacctctgcctcgacattggacgatgctttcagtggtgccgctgacgctgcctcatccactggtgctacaagcgatggggaagactttagcgaggacgaggacgacttgccagctcgtcgccagaggttggactccagcccaatgctgccgccgggaaccatcaagcgccacctcaagggcctggatgacatccttcccagcgccgatagcagcgaccacagctcggatggtgcagatgatggtatcaaaagtgaagcggaggaggatatcctttacaaggagtttgcacctaaggcaaagaagccgaaaagccgccccacatctttcaaggttcgcagccagaagcctgcgcctgcgaaattgaacaaaagcaagaatgctatgcccgctcctcgcaaatcatccgagaagtcggctgcgcctgttccacctctcagcccggcgtcttcccgaaaggtctcggggggctcagtcaacttccagcaccagctcggtgcggatgaggaagatctttctaccaagcctcgctgtcagcgatgccgcaagagcaagaaaggctgtgatcgtcagcgcccctgtggacgttgcaaggatgcaggcattggaattgacggctgtctcagtgaggatgagggcaatggtcgcaaagggcgttacggtcgtcatatgggtgtccccgtgaagaagaacggggaagaaatggatgaagacgaggaggagttttcattaacgcctgcgacccctcccgtctcttcgtctatagcagacaagaataagaagcggaagcgctagtggagctgcaggttgcaattgcccccgctatctctaagcgccgaactgtttcgcacctccaatcttcttcgtgaccatggggtctctcattcatcttaccatcctcactatgggccaatctcatccaccctcactctctcatttcgccttcttctggccagcgccagagacagtccttatactagcatcatcatttgcgcttctcactacacattcccttctctggttacaagccatgcttcctccattgtacactgccaagcggttgatctattgttgttgtgtctcttcggcgtcttagtgtttctgtggctatatgcttcttgtcacatccactcgctcattcggaatcaatgctactgggttatttatcattgtctatgtcggtttcatgtgtgtggtgtacggatcagtagcggaagcattatatacttccgagggatggcgaggtcaaagcgtgacaagttgtagaacatatggccgatctcgacctatttcgtcttccgggtagttagggagtcaatgaaagggtttcaaatttttattttgcacttcaatcttccgacgttccatttagtcgtctcatcatggcttaagttacatggagacatggcgggatgagtcacatgacaagagcggtgtgattggccccgcaacttttttaaagagcttaactttctcgaacctcaaaacgcttgcattcttttgccaaacggcgtgttgcttatttctagttgcattttcgcttttaacgggaacagaatttaggtatcccagcgctgagactgcatgtaacgcggtgcgcaaaccagcccctctacacgaacttttctccaaccgcccagcaagccgcattaagcgccttgtctgaaaagcgaccacaatgcctcccaaagctgcctctcgtggaagcgcccgtggaggggccgccaaccgcggtgctcgaaccgacacaactactcctactcccgctggcggggacactacgcaaaatgctcccacggcaactagcgcgcccggtcctgcgagtcgagcctcagtacaacggcttcaatcactgaacaaacgcacaccctccggcagtatcgcgcccagcagtcggcctccatccgcgcttggtggtgagccggccaaaccagtcatgaaacacaaaccgaaggccgttggacgtcgcagcaagcaggagcgagatgagatagagagacttgaacaagaacgatacaatgagcgtctgaaggaggctgccgctatccaacgtggccgtggcggtactgctcgtcgtgctgggttccgtggccgtggtggacctatggctatgggcatgagtggatttggtggccgaggcgggaaactaggccgtggtggttatggcggcggaagtggaggtggttatggaggaagcgcaggcggtgcaggatcaggatacaatcggtctggtcttactggggtcaaccgtgggcgcgcatatgactcttcagacgacgaagagaatgcactccgtgtcagcatcgatcatatcaacctcgatagcgacgaggaggattgggatacgccgaaggatttcaagggcaaacaacctagcaggtcgagcggggaacgcggacttcgccctgttcgtgttgagcgacatgaacacgaggaaagagtcatcagcgtcaacatggaatctagcaccagcagaaccgccgacctccgcaaaaaagcagagaaggagaaagcagcgaaggatgtcggccgtacacctaccaaggttaaacccgaaccccgagacgacgatacaactatgccggatgccattccacatgcagatgacgatgacctcctaccagagcataatgttcgtgtgcgctcggctcagagcatgagcccaacaaagaggagcacaacagaattacgatcgattcaacccacgcctgagcccgaaatcccagacccacgcagcctacttcacactaaggaggaaatcgacgaatatgaccgacacatggaagatttggctataattaaggatcttcttgttcccaaggagtcaaagaatgccactacagaagcagaaactaccgaaggagctgccgaaggtaaacccgcggcagtggaaggacaggaaggtgaccaaccgaacgaagaaaaggaagaagaacaggaagaagacaaccctctacatggccagatgttcctcatgcaattcccaccgatgaccccctacctcagagtcgccggttcttcccaagacaatcaacaccaagctgcagcaaccgcacctccgccgaacgagatcaagcgtgaagcgggcgacgacgtggaaattgtgggcagcacccaagcaaccgaattaaaagagaacagtgtcattacagccggccatccatggtctttgcccacaggtcgtgtcggcaaattgaatgtacaccagtccggccgtgtgaccctagattggggtggaatcagtatggagttggatcgtggagcaccggttggtttcgtccaggaagccgtcatcttgtcgaaggttccaccggagtcggaagaagacataccaaaacatgtttggtctatgggccaattatctggcaagttcacagtcacgccgaactgggatgagatgctttgatacctctacaaggcatcttatgatgaatggaaaagaaatttgcaagcttactgcagcaattgtcttggttgttaacttgacaatcaccaaaaatagttagactggggtaaagtttcccttttcctcctcaagaattcaactttgaatcccatctgtagtcacgtgactatttttatatgtatgtgcaggattgcgatagagatagctagttgtctctgctcgttctttctctcccagtctctcttcgtagctaagagaaaaatacaactgtattgcacgctatattccaacttttgtgtgactttacaatggctgcggaccagcttagtaatttcaccaaaagtgccaaggcctagttaactatcgcgcaagctgctccgtacacgaactttatttgcgcgtgtcgaattcagagcatttgaccattacatcctccatgcccaatagcaactacggtcgagcacaagcgacaattcagccaatccaactactcataatccctctacaatgcctgcatagaccaaatcaagtgtctccggtgctacacgagtgacgaaccttcgccatgtcgttgcgtcctctcggatatcaatgcaaactcccctatgcgcaattattccgcaatggactgcaaacaaaacaaaatatcacacaacacctgagatccttttctcaattacgcgacacccattgcgcacgtcgctggtccgcgacatttccacaccatgccaacaaagctttttcgctacggagcttgctcggtgatcttttgagacctgcacacactattcggggccagggcaagggattgtgggctcaacaatctcgctatgagagctctgcggccaaagaaccagaactctgcgcacactgcggtggaaaaaccatccccaaggctagaaaacatgtcgagcctggcaacccctccagcggctggtattgcaaaccctgtgttcggaacatccgtgcccatggccatctgccaaatgaggagcagcttgcaggcatccatcggcggaggttgatcagggcgagtggagaggcaagcaaaacaagcccatgcgggcactgcggccagatgacagctccgagaagcagccgtaaattcattgatgcgaacaacccttctgctgggtttcactgtcggacatgcgttcggcatgtcaatcatcacggtaccctcccaaccgacttagatctcgcagcgttccagtaccgcaaacagatgcggagtaggcgtcctcctactgtcgcctcaaaaaataacaagtcagttacttcgaccggagaatcagcagtggcccgcaaaccttccaagtctcccaaacagatgaaacagagccgcggcgaatacccttgcatgcactgtggtgacaaaaccatctctagcagcaaacgaaggctcgttgagccccagaatcccgcggcaggttactactgccagccatgtacacgatctctacttgaaacggatgccttgccaagcaccgtcaaaattgcagcgctcaggaaactcagagcgacccgtatgcaaagcaacccacgagttatgaaaagcccttgtgtccactgcggtgagatcaccgcccccagcagcaagcgccggctagttgaagcgaagaacgctcaatccgggtattactgccgcgcctgtgcggactgtttaatagaaaccaattccctgcctagcgacatacgccttgcagttcgcagagcgcgagagcaggtcaggctgaaaaacttgcaagccagtctatctaaagaatcgcagtccccggtatctccgcaggacggagaagctacgccaacggatattctcacggacaataccgcaaaaacttgcgcgcactgcagaaccgaagagaacacgtcggaccactgaacccggatatgtgtttttgtgtgtggagctttttgatctcaacggcttgtttttgaggctgggggtacttttgcgcagagaccgcatgaaaaaaaagtacggactcggattagagcggatatcaaggctggtcaacggttggattgctgccagtgcaccgcgtgctcaaatcgatggccgtcctttgatctggtcgatgccaagcgcaagggtcttcatatcttgattttagtaccacccataaatgcgcgtcgtcatcttgcctgcggggtgtgctcgtctattcgcccggactttgcgcctgcgttgacgatcctgagtggcgctgtccgttaagcctcgggatgccttggagctataattagaacttggcggaacaaaatgggatttttattgtatatacagggggtggacatgtatgctatagatgcatatgtcaataggcatctggaattattgaatcaccctaacagcagcgcatctaagaagatatcccgactaaaataaagaataataaagaataaataaacactttggatagcttcagacctgggaaactgggtaaccaatcagagctcgcagaattcagggacacacccccactcctggacggcccagggacacagggccaaagaaagccaaagagcggctcggccaatcagagcctcggcctgactggcttcattttgtttttcccttaatttccctttcccccccctgggctgtttcggctttttgggttcttgttcttcttcgttctctctttcaatcctcctctacggctaagagtgagttgggttctgacaattgaaagagtaaagacgaaataccccggatactcccctcttccgtgtttggccccctattcccccggttgcctgactgcgacaattcaacacacccactcggacctgagtggcatgctttgagatcctcgcaacttataccttatattcgtgaagacattcatctgagtcatatcgtcacttccaacctcttctccacctccatctgcagactgcagcactgttgccttgccaactccagaccccccgatccccacgacccgcaccagtcagcttggcgttgcttgtcctccataggcaacaacgcaaagcatttgcgcgccagtctattttcatacactatacatctataatctgccacaatgaaaccatccaccttcctggtcttccttgccccggccgcggtgctcgccggctcacaacaacccgccgcaggtgccagcctctcctccgacattgcacacaattcgcccgctgtctcattaccagaactcgctccgcgggaacagttcgcaccatttgcggaccatgatctgccatctgatgagatgcgcttgctcgctgctcgctatgtcctccgcgcgcgcagtgagggctccctcggccagaccccatggattggcatggcgatcggattgacctttactgctctggcggctgtcatgctcgggtgattgtcggcatggaatgctttgaaacgaaccctagctcgactgatccatatacctctttctccgcctcgactacttctttttctcttgacacgacacgtgaaacgccgggcaccgctcgaactctgtttatcttttactccgctcgacatatttctgcgacccttcttctttatcttcattttcttatggtcttttgcagcgaatttttaccattttgtttatttttgcatccatggccttgtgttctggcgtgggattggatctttgagcccccttttttacctatcgcattccccgacttgctgagttacttggtactgttgggagtatagagttacatgttgtacgcatgttgtacatgatacctttttgtttctaatgcagattctcccgtgtgtatgacctaattagtatatatagatatggccaatacgaactgactatacgtttttgcttttcttccttttctttcagaccacatttttcttagtttacgcctttctcatggctagactcggactggggatggctttctttgttactagatgagcaacccattgccagggcaaacacagagttctcgagaactgtcatattgatattttggtttccttcaaatctattttcaaatacccttagaaagagagatctttaagtgggcatataccctcgctacactcgaccccaaagacaactatactacagccctaactttcaccatggcctcggacaaatatccaccctacgtaccgatgccctcgctccgccacgagctagggctggtgttcggcttcttatctctgtgcatagtggttatgggagcatacgttgctctctggcgtggtgagttcccctcccactctcctttccatcatatatcgatgtaaagatcagcaagaccgtccgtggtcatgtcaaacacatacgtacatacaacttcaatgcgatttacttcagcataatacctacactacccctaacagccagccccagtatcccaaacccgcttagacgcccaagacctcgcccgccgcaaagcctttcgcagcaaaaccccaacccaacaacccctaggaacaaaaccccccttaacagcaggccgaagcccaagtcccatcaaagacacatccacatcaaactccaaagcagctgtgcaagaaaaaatgctcgaccgcgtcggcatgcccgagaaccgtgccgagctaccagtccacgggatggaggtgtacgcggctggaaaggggaatgcgagcacatcgcaaatcagaagtccacttggtcaggctatgccgcttagtattgttagtcctgttggtccgcttgggggtagcggggttgcgggtagggctgctagctctgttagtctagttggaggtgggattgcgcttgagtctattgttggggtggcgttgaaggagggagaagtttgagtcgaagtcctttgcgcgttgatgggttccggtcggtgagtccggcgagaaggtttgggggtggaattggtccacctgttgagattgggcctgcgcctagtagggagtaaggtgttgcattagtttataatgatgtaacatattattttgtatcgcagctaggagcaattaatatgacaaggagaacgctaagagaagtaaattttagactaagtccacaatgagagataatatttgtaatcggtcgatgaatgtatgtaccttgaaagaagaagaaattcgggatagggttatgcgggtcagaagtgtgaatagcttcaagtgatcccaaaggagaaaaaaaggaccccagaggttcttcaacagcagctagcctagggacagtttcctcgttggtattggactaatctcaccctgctcgaggaacagagcacatcccatctgagccatgggtgttgggaattacaatatctgccttgacctttctatttataatcacttttgtttatcgttccttcctcggcaaatacccaggaccgctcttgtctgggagcagcccttcctgccattccaacaattgtcgtaccttctaagattccttctcttctactgagttccacgtcatgcatggcctactaagctttctggaagtatggcggtttgatgctttggaaaaattttgatattgtctccaagggttgtccatatcaattcaactcatatagttgacattttgaatccttctgggtatattttacattacattacaccaccagtcatctatccacacaccggctcgtcaaacccacgcgtccacaacaacgaacccatgatgaccaccaaaaacccaagcgcgacaagcacactggcacttccatacaaatacgcatgacgccgatgagacagtcctttcaattcagcaacccaggtactgatagtggtcgtgctcccgcagaatccatccataacaccctgcagcacctggcaacctgtcagagcagcaggaaccacccccccaagatcactgacatgctgcaagtcatagcacataccctcgatgatggtcccaaagatattgaccgtaaacgtgccgagggggaaggtcggaatcctgccattcaggtgcagcgagacatagaaccgaaggagacagccaagcggtgaaaagacaatagcgaacaccgcccggccgcgccacacatccgggcctttatgtcggtctggcggccagatggccaggaacaccgccccgagccaacatccccaggcaagcatgaccacaagagggtcgaggactcggcgcgtgaacgcgaagggcacggtgggtgtcacgcgtgttagagccagggcaatatgcgcgccgacgataagtgccgacaggctcagtgacacggtgagtataatcacagcgaccagcgccataaagctatacccaccattacgggaggcaatgtgagatccggttggcagggatgggtcggggagggcatttgccagggcgaggaagacgtcccgaataaaggacgagaaggaggtgaagcagccacagaacccggtcgtcagaccaatgtacagagggatagtcttcttcacagccatgtgtttccggcttttgactttgggctcggtatcaactgcatctgcaggtgcttctttggttattgttttgccccattcttcgcggaataactgctggtcttcgctcaggaaacccattaccaggcttccggctacatttgcccataacacccctgttacgacaggcgcgcctgtataaaatgtcagagcctgtaggcctaggcgggccagtgtaccccagagcgagaagaagattagataggagacggtgtagatgtgggttgcgtgtttggagaggggcggcgcagcagatgcaggttgtggtacaggtgctgcgcggtcacccgagttttgccatgattcatttgcattcgcctgttgggcctctcttgaagggtcattgtttcgagaggggttatcaacatcggcagttgatggcattgctgtttcagtgttgaagggaggataaggggaaaagtttgccaagaaccggagaccggagatcaggtggagtccgataagattaacggtcattcgcagagtatatgaggggaagaagataaagaggtgtgtcttgtctccctcctcctcctcctcttcttcttcttcttctctctctctctctctctctttcctctttcctctttatataccctctatacttcaccatgtctctcccatcaaatgtccacgtctcctcccatccctgtctacaagccaagctctccctcatccgctcatcttccaccaccccgcgtgagacaagaggcttggtccatgacattgccaatatcctaggcgttgaagccttctcggggctgaagttagtcaaaacaggaacggtaaatagatccccaagaccgagatccataccagcattgcgatctcctaacactcattcccaggacaccacgcccctcggaattgagtatgaaacccagggcattgacccattagacctagctctagtgccaattctccgctctggtctaggaatggttgatggtgagtgattcttctattccgcgtgatccgctctagccagcactgcaactgtagcccatgttattccctgcaatatgaccatactactctcctattccccaattcccattcctatatccaatcccaaacaccacagttgcaatttcattcgcatttacagcttatctcctcctttcgtcatcccccccactccctatccttatcccccactcctaacacgtccacgggtccaaaaccccgcttacacaaccccacagccctaaacgacctcctcccaacctcagtcccagtctaccacctgggcctgttccgcgaaaaggtctctctccaacccgtagaatactacaacaacctccccttccaccggtcggagctgtcgccggcctcgccagcttctctgaacccaaccaccaacaccgcagcggcaagcctggcggtgctgctagatccggttatcgctactggtgcgacggccgaggcggcgatccaattgctgcgcgattggggtgtgaagaaggttattatgcttagcttgcttgcttcggaagagggggttaagcgtgctgcggggacttggggtgatgttgaggtttgggtcggtgctattgataagggtgttgatgagaagggcatgatcgtgcctggtattggtgatattggtgatcgcttgtttgttgctgttggaaagtagacttaactttatcagcagtgaagcatggctgttgagggtttagatactacagatgattatgtacctaccactacaactacaacttcgctacaaatgatcaaggctttaaactacaattgaagtctacaatctagtatttaggaaagaggttgtccccgccagataattcatcgataacgtatagtacatggaaatggcataaaacatgtgcaggtgaaacaaatgcgaaaattgtcaaagcaatgctgagcgttaagagcatggaaagcaaaagacggggtcggaggcgcgcagacaattaacatcaagtacagcggctggaagccaaccaaagaaatagaggtaagtggcaagatatgagaaagaaagaaaaaagaaatcaacacgcacgcgaacgcatgaaaagtcaaaaggtatcgaaagcacgaaaatcagatggacggggggcacgattaggggttagtatgaaccataaagtcaaactccacggagtgcgaaagtacacacaggaccagccaggtgtcgaagacggaaagcagaaacaccacactggactccctggtgtaataaaaagcaggggaaatgcaaaaaaaagcaaaaaaaaagcaaagactaggaaccaccgagagggatatcaaaaggcgaagtattccaaaacaagcccaacaccccgcctgcccactggcatgtccagtcctagttccgaggtgtcccaatgaaagcgtccaacaaatgagagtaagaaattgaaaacacaaatttcaagaaaaaagcagaccgactcaaacagattgaagagaaaaaatttagtatgcggtgccgacgctagcaagcgacttagttggcaccgcatggatcggctgatccttgcgaacacggagagaatcttcgtatccgaccagggcctgagagtgaagcttgaatgattcgcccatcaacttggtgattctgtaaagcggttagttactggaccataagagtgaatagggatgaaaacgtacccccagacaaccacgccgtctaggatgttaccccatacacgggcgacagtagagctgagttttccaaaggcgtcgatggcatcgtcgtcaaacagattgcggaccttgttgtagagggccaattcagcctcagttgccggctcatcgtcatgttccagacggtagagccagaggctcagaatgaccatcagatccaggccgcacagagggttctcaacactccagttggtggcagatgtcttggcaacccaattgatgccctgaatggcggcaatctcgatgcattcgaaacattgttggataactttgttcatctcctgcgaacgcttgaccttctcacgagcgacggtcatcgcagccgccacctcatatgaggagtggtaccgcatcgcctcctggatggatttaaggtcaacttccaggcgggcgcgggtgttgcggtagaccgccatcgagttgaagatcaaggggtgacccttctgaggggtgctaagcgggaccacgatcgtttccggttcgcacacctcaagggagttctcccaggtctcgagggccaggcgcagcttgtactcggtaaccacatcttggagcgcctcgaagctgcgcttgtggctccaaacttgcaagaacaaggcgttaatgagaacacgagtggcgaaagcactgtagcgtgtctgttcaccctggaaaaggcagtcgtgggcctcacgcacagtcaaggcgctcgagaccgtgccacggcgccaactctcatcatcagcctcgtccaaattccagagagactctgaagatgggagctccaagtcgtcaaactcatcgaagctcatagcgggggtgtgattgaatgtgagggtcaacatgccgaagaaaatatacacggcgaaatatgtacgacggcaggattcgtcctcaatccactcctcgcgcgatggctggacattctggcgcgcctgagtgcgcaacttgagctggtatcggttgccggcgaccatgttggccaggagactcttgatcgaacaagtccattcaaggcccttcgggtcaccactccagctctcaaataccatgttcaacaaagtagcctgcatcaatgtcaaggggcacttgcgggaatcaaaattgtccttgtgttgcaggaattggttgaccaggaccttggagccgacgtggagcatgaaggcgtgttcgcgctcgaaagtgtaaagagcaccaatcgacaaaaccgcaagcaacagcggggctggaacttgggaaggcttaaatgattcctggtgcaggaatggcaagtgaggatggtacagattaaagtaggtggacaaataccggttcagcgcaaccgtggaaggaagctggaaagtatctggaagcgcacctaggctgtctgatccctgaatccgatcaactacatagttgcgttccatctcgttagcgagctggggagccttgggaagagtcaacgcttgactagggccaggtgagcgacggtagttgaccgggctgaccggaccagtcatggaggggtagggcgacggcgcattcggggtagagtgccccgacataggcagcgagttggacatcagaaggtcgccgacagggccatggcgatcaacgagggtgggcattgaccccggttccgcgggggatatgagcgtgtcccagggcatctgaggcagagtggcgttgcccgagaggtagggctcgaaggagccgcgtcctggcgaaagcgattcggaacgctcggagacctgaccggtcgccgctgctgcagccttatgttggaaatctgtcatcaacatggctgcagtttcaaggtcgaccataccatcattgctgctagcctcgatctgctccagggtcgtcgggtcaatggtgaccgacggccgagctggggcagatgagtttttctgaacccctccaccgcgtctgcgtccctctgcaaccagggggataccgccatccttggcgtgcaccgttctgtcatgtcgcagaagaagatcgcgacggacgaaggtactgcggcattttaaacacttgaagggtctttctttcgtgtctatacattttcgagtctattagcggggggggaaacaaaataacacatagggaatgttggcaatcttacgtgagcgctcatggcgactgcgatgttcacttctgctaaacgcgcgattgcaaaattggcacttatatttcttttctggagctgatgttttcttggccggtgagttggccgtcccaggtgctgaaggtgccatgtgtgcgggttatctcttagcaagagagtagaatggacggtggtattgtcccctgagtaagctcgcaccggttctgtaggcgtgtcgatgacaggatttcgttgggatgtctgatcattccttgagcggggggaaagggaagtaaaggtatatcgagagtggtgtccagccacaagtaggaaatattaaagaagcaaacgctgaagggaaaaaaagaatggcgggatgatcaaccgcgattagatgaggaaaggggaggggaagaagagaggggaaggaggatgaggagaataagaaggaatttgggagttgggaaatcgggttttttggttttggggggggnnnnnnnnnnnnnnnnnnnnnnnnnnnnnnnnnnnnnnnnnnnnnnnnnnnnnnnnnnnnnnnnnnnnnnnnnnnnnnnnnnnnnnnnnnnnnnnnnnnnnnnnnnnnnnnnnnnnnnnnnnnnnnnnnnnnnnnnnnnnnnnnnnnnnnnnnnnnnnnnggggtggagggggagaggggaggaagggaggggggggaagggaaaaggacgtgggtttaagctaatcgcttacttttacgcgtcgaagtacagaccagggccatccgagggtaaaagcgggaccgatcaccgcgagaatcaccgccgagcttatcatcgcgctacctaggtatcccagccacctctccggccacgcactttaccttcctctgtccacccactatcttactcaaatgtgccccccctttctttaccatacaacatacggaatcgacacgtaattattctaaaaaagccctatagatttgtcccgatcgcaagcccacatggtctaatttgattttccccttggatctttattatcataattaaacactacagggtcgatcatttaaatgtttttagaaattgctgcgagggtgatttacatgtactccgttgtgggttaggttattgaatcgtgcccctcgctcagggtttttatggggacgggggaaattctttgtttatcgaaattatgtggcatgtgaggcgattcgatcgtggcacacttggagaggctgtgagaatagccccttattcactaatctcggaggtttccccctacagggggagtatatcagtctcacctgagaaacctggaaaagggtatcgtacggtttgatatcagaccctagacattgatagatcgcaactatggttcacatccgttttacccctcaacccctccagtcccaagatccacagacaacatccatggatacatacatctatatcaatttctagggcataactaccgacgctggtatactgcttacatttataatatcgttgtcacacaactccgaatctataatctatgcttggagaatgagacagggatatcagatatagagttgcatttatcttctctgaatgtaagaatgccgatgctgagaatggcactttgatgcgctggagtatacacatccccacgctaaaatagttacaccaatgtgggaaagtagatcgatccaacatgaaatcaattctatgtctgggtgcccatcagccccgtctcctgacagatcatcccactgtacttttgtcgcctcacaaattggctggtccagattcagtctcagctgtcgccctccaaccctaatatagttgcccccgccctgtggctgttcatctgtttgactgtgccacgctcgagattatgtgttccagccgtgtacaactgcattatgtaggattgatgtaagtaccctgtattgtcctcgaggcatcacctgccgaactacatccagaaaggatcgacagagcagaatgcaaatcggagcgttggatgggcatcttctgattgactagttgtacgttgtccttttagtttgcattgccagcacaaacgattacggctaaccgcgctacaaatgctatactacggccgaatgcctagttagctgtcaaatctttcgaggctccacacggtgaagttgcagttttatacaccgcaaaacctgccagtcatgtgtactctccgctccaaagtaacaccgttacctatcaccgagctggaaattgggaatcgcgagttcccgggtcctatcagtggggcgaagccaacacttacatcattggagcccgaagatcccggacgcggaccaccgacgcggttacttgggaaacgcgcttcgaacacggcacgtctctttcacctggacaagcaaatggagttggaattagcacaagtttcacctcatatcgaccggcatatggagtcctatctagcctgtacctgagcacccccttgattcgcggaagccaaatccctaaatcctgtcccggacttccggttgatcatcgaagcctgggcgaaacttcatctgatctggtggatctagacttatcaactagcttcaagccccggcggtgaggtcggacggcttaggtttttcaccaagggatcaaaaccttcgattcttgatgcaaacccaaccggtcgacctccttcgagctgctgctcggtccacttcccgatgcagcggaccgacccagtctaacgctctcgacccaggaacgaaaagcaaaacaagttggcaatgatatcaaacggagagcggtgacttgaccgcctggcaaatactttattccttccttgcctcgaaaggtaatacaccagaggatccaccattcccaatcccttgggccgcaagtccgggttatgtctttggtctttcattccatgcccctccgagcggtcaaaagcacgaacaaaagaaccatcgaaaacccgcccaattatggatctgcacggaggatccaatcggaccagttacgaatcagatattttcgaccattctcccttcgagctctgctccacctcagcaagcccactattgtaacaagaatttcaggaacctcttccccggtgccccctgagctagtggacaccgacagacgggcgttgctggagcccatcgtcccgactactccatagccaaggtccggcgtctccgccgtggacgccaggacggtctggaatctcccaactcggtcctattctgtgagtaagcccaagccagccgtctccaagccagacatgtcggtgaagcccgtttcgtgtcaatatatttggacttcaccgcttcggcaagattccaactcggtaggttgtacggagtatgtatgttgtatgaagaatctattgaacaagcctgtccccacgggtctcgacttcaaccgacttaacggtgtgagggtcattattgatcgcgtaaatcgggaaactggattttggcttgaaattcaagtctccattgtgcgcgctatcgccgatttactttcgctaaataatggaccccaacatcccagcgttgagacaaagccccgagtcgctctccacccaacgcgtgctttgtgttgtacgtcgtaaagctctttaccagacaacgggccgtcggtgggtttcagagtacggacgtattacacaataatagaaaatgcgcctgcctactcggtccaggaagtccatttccgaattctacgttcgcaccgaccatcccgacacgagtctggacttcgggcgcccgcgtcttgtaaccgcatccagcgacacgggtaaacagaagcttttcgtgtagcgtgtagcatgtggatattgagaaacctgaaatataaaattcagagccctctactccgtaggtatggagtatgtacggagtcctatccggcctatgttgtgctttgtctagttgtacattactgtactccatactcctactccgttcatgtcgatgatctacagctgcatgacaggcctgttcatccaacttgttttgaaccatggaaacatgatcaatcgcagatgcgatcgcccaatccctggatcgtgacggaaggggacgtccggggaagacctcccggtccatggttcactcccggagcttgattctcttcgtatcagacggacgagtcacaattccatttctgcacaacctgcgagacagactgaagcccggccgatttcagtgtctgcacatacatataacgtgccgtgcatagaaacgcaagtgccctcctcgaccccttgtcgcgttggcaaattagctgtgttgattggacgattcctccgatgcaggggatacaccacatatgcgagcaccgattcatcacattcgcgagatcgttcaatatcatccatgcatttttactgtgtaatattgctgatctctaacatacttatccaacggagatggtcccctcctccccccgcgcggagatgcgccgtcggaattttctcgaaaaaggtggacacggggctagggagactaaattaggaaattgacggagaacggagggcccggagagcgctcttcgtttggagtgtcgcggcttgattgctcgaaccccgctaaggtttaaacgtgcgacgcgcccgtcttcgagaacataggaatcaccgatgaatagactttcatagtgtagacttgggggggctactccatccgataacaaaggcaggcgggaatgggaagtaggtggggaactggccgtcgtgtcgcatcgaggtgggaagaagaagaaaaaagaatgaaaaggggggagttaatgatcatcggagacccaggactccgggtaaacaagagggtgggatcgtgtcgctattgggtgtgcgctgcaccgagcggcaggattgggtctcggcaggtgagaatctctccggctggggcggcttgtgagtggtgatgatgtcgtctgggttcctgcgactggctggctgcaaggaacaaggaacgagcgtcgtggcaattttttaatttgaagcccgtttgagttgctatcgggcttgccctggaggagtactccgtatacagcttactccgaaggtctaggcgcctcttggtttattggatttcttagtctcattctcacttactttctataacatactccgtactccatccgtagtcagataaatcgtactttgaagaatcaggggatttactaggtactcggaacttggaattcaacaggaataggatattgagatacggagtagtggtaacctttatgcacttgcacacttaagatatggtttcagctcattctcctaatggggaaggtgatagagagctattctggtaaaagtataccaagtaaaacgtatgctacttatgtggaactttacgtgagtccgattgtgctgtttcttggtgtctcatgtctgtttattctgtagttctgaggttgattttaatagggctcaaaatatgtgatgttattggctagaaatatgtcaatatatatctataactaaggtcgaatatcttcaacctattttcttgtcaacacatagatcattctatccattgtcccataataccttcgattgcaccatacactcgtcgggaaacgaaagtaatgtagaggttggtcccaagtcgagaccctgatagatgttggtaaatcctataaacctaatcagaaactgtcccctgaattggcgctccgcttcatccgatattaatagctcccagatactggagtccatgacgaggagatgtatgcatatgctcacatcggcacaaaatactatcttcagatgcaggttgatatgcccaaggaacagcttgcttacaatgttcctctagagcttgctcaagaggcagcttccagctacattgcatgaactttctcgcctcgacagaagcggaccgagctctacagcgtgttgtaatgatacgatgctactacatcattgaatcctgatttgctttgaatatgccgaacatggcattaatcctccatgcatgagacgccgaaccttgtccgcagagcattacgcgtcgccgatgagcacacaaccctctcaatgctactcaaccccacgagaagaaacggtccgttgagtggataagtttccaaaccctcgggtccattgtgcatggccttgaattgagaaccaacggtcttacactacgtaacctatcagggtcgaagcttactttgaaaggttctcgatacgcagggagtttcatgcaaaaataacaatcgcccaggtggagattcacggaatactccgtaccatggttgaagtatttggattggctgttcagatcatgccatatgctgtcagtacgcctcatccgagaagccaaaggattgtgatcgcatatgtacaacatacggagtactctgtacgaggtatagcattccataaagtccatatgcgttgggaaacatcgtacataacaaagttttacctctaaggagttagtcttgaaagctggggttaggaacgaggctgcatgccatgcagtaatatatcaccgaccctcttgtctatccacacttacatcaaccacgggacttcattgccctgttttggccattacgtgtatatcatgtgtactccgtacaacatatgtacctacattgttgtatgctgttaggtatggtaccggggacgagcgccaggatatccgattgtggaaagtgggaacttggaaaacccactttagagtagctcgaaattaaatatattaaaaaccgccttctagaaccattttagcgcctattgattagagaataatagacatcttttccggttgtctgaaagagttccatggatgctataatagaaacaacatggaagataacaaaagtgtctttcgtcactctggggctgggcatctggtctcgttggatatcgagcatatggaccctatcgttcattcttactgagacaaggttgtcgggtttgcgcatatcggctccccgaggtacataatgcagtagtttttggatccccttactggttcaagctaggatatccttgatcatttattgaatggagatagtaggaattcagttacggagtacatataatgtgtcaaatctaggaaacttgcagctcggagatcccatgtcgttcttcattgcaaattgatagatgtctccatgtgcctaaccaccaattaccataattgaatttgtcttttgtgggccttagaccagtcttccacggagtattttctaatattcttgcctctgccatcaaatttgaggctatccgtggaactacttggtaaatatacaaatgtacctaagcaggatgacagcttgaacccgtatgggcaaaatgtgaccctatcagcatgcctaggtacacccggctgttataagcgtgcatatttcgtcacacgcagacacacagacagtggggaacgtcatgctgtgaacgaaagacgcagaaccaagtatgtaataataaattagtctggggctctagatgtctccaggaccaacacacggacagttgcccccattagtccaaggggcccagacttggacttcctaaaagctatgtcaaatgcaatttagagtcacatcatgtcaaatgggatgtggtacctgtaagactgtagatatgcaagtctataattgacagtatctcatcttggtgtcattggacgtcgtgttcatgcaacgatagaaacattgaatatttcatgaggatgtatagtattgtaatcacatggtatctttccgctggatccccctcaaaacagcctttccatgggctccatcgtgtattaataccggtattgcatgcgcccgtcccgcctccacctggtgcaacttcccctaattcaatcccacttccatttccccattgcctttgttataactcgttgatggcataatccgctgtgctggattcttgttctttgactacgcaaggtcttttttcagtctgggtaaaaagtgactctgcttccctcgcctcaacgtcgaatatagtcatgagcggatattgagctcaaaccacccccccccctcaacccctccagaagctctctggactgtggccctgtgagtcaccgatgtttgggattcgcgcggcagatttagctgtcgacactactgcgctggccaaatccggatctgttgcgaccgcattcgagtacaccgacgaacaagtgaccacgcccacagccctatcccgctatcgcggtcggggaaacagtgtatcacgagatttcaaccacatcaaccattccccgagcaaaatggcctctggatatgcggtcagcccggagccccccgcgctcttcgtacgggccatgtacgactatgatgccgacgatcacactagcctgagtttccgccgtggcgacattattcaggtcctcaaccagctagaaaccggatggtgggatggggtaatcgatgatgttcgaggctggttcccaagtaactattgtaccccactcacggaagcggacgatttcaccaaccagttcgcacacacccaccttgaaaccgagctcggcgcggactctggactcgaagatgaatatggcgatggacatgatgaggatgaagtgcactccgatgacaacgctcgagacccacagccgattcttcctatggagggagtcgcagcgcccaaggagcaggaagaggccgcattctggatcccccaggcgacaccggacggccgtcttttctacttcaataccctcaccggatattccactatggagctccctttcgaaaacccgaccgcaacaatcgaacccggcccacgagatcgaaataatttctatgtccccgaccagacacggccacccccggagatgatggcccgtggttttgagcgagatgaagacgagtacgatggctctgcatcggaggccgaaggagaatcattgatgttaggctcgcatggctcgatttctcgccgacgccagtccgtgatggacgggatatcccccgccacgtctatggattcgttgtacgccccaggatctaaagatttcaaaatgccgcacccgccgaacaagcgcccgcaaaaatcatacagcctgggcggaaacagtaccagtacatctatgaccgaaagctattcgagaccttctatttcctaccctcctcagcattttgtcgacgatggcttcgcaccaccaataacctggcctttgcttgtggataatatgcgccacgccgtggaatcttatcgccaaacgcttttcaaaggtgagcgtgcagagtatgtaagaaaggccgaggacatatccgaccatcttcgcatgctgcttgctgctggatctgacaccacggataaccactctggcaacccatctatcatttccacaaacaaggccctatatccttatttccgggatatgatgtccaaattctcgaagctggttctttcatcacacattgctgccgctgattggcctggtgccgactcggccaataaatgcttgcaggaggccgacggagttatgcagggtgtgtatggctacgtggaagtggcacaacaacagcgcggagatgtgattcatcgcattgtgcctggcttcgtcagtggtagctcttccggtggtagctggcagaacaatggtgtttctttgcatacttcaggtccaacatcattccttgtcccggatggagactcgcgatcagagccttcggtctctcttgacactgcgtttttggattcaatcgacatactcaggagatcttttgttggtagcatccggcggctagaagagcggctggttgtaaaccggaagatcgtcacagcgcaggaacatgcagatattgcggatgcaatctccgctgctgcaatcaaggtcattgaacagtttcgcccatggatctcttctgtcgagtcgatgaatttagctccgttggggaccagcttccagaacccccagctagtagactttagcttgcaaaagcagagagcctacgatgctattggagatttcgtcctgagctgtcaagcagtttccgcccctctggccgatgagtgggccgagcttcgtggtaattctctcgacgatcgtgtgaatgccgtgcgaggcatcgccaggcagttggagaactatgtctcccagattggtttcccgctgtcgctgctccttgagcaaattcccaccgagccagtatcatctctacgacgtggtagccgccaggaatcggatgatgagtcgttcaagaagatgcatagccgaggcgagtccatggccaagattgcagagtcaatcggaattccatcctcctacgcccctgaaaaagaaggtggcaccgataaagtacgaagaaatatggacaaggcccaacgattctttggccaggcacccccaacagctatcacgcgagagccaatccgtgagccagtccgcgagccagaagagactccctggttcttgaaaatggcccatgaaggcgaagtgttctacgataacaagggagacctgccaatcctcaaatgtggaacactcgcgggattggttgaacacctcacccgccacgataagcttgatgcatccttcaacaacaccttcctcctcacctatcgctctttcacgactgccaccgaactatttgaattgcttgtccagcgatttaacgttcagcctccatttggcttaaatcaagatgacatgcaaatgtggattgatcggaaacagaagccgattagattccgtgtcgtcaacattcttaagagttggttcgatcacttctggatggagcctaatgatgaactgcacatggacctcctgcggcgtgtccatacttttaccagcgactcaatcgctactacaaaaacgccaggaacccctacattattggccgtgatcgaacaacgacttcgaggacaagacacaaccgtcaagcgccttgttccaactcagagcaccgccgcaccaacaccaattatccctaagaatatgaagaagttgaagttcctcgacattgatccgacggagtttgctcggcagttgaccatcattgagtcgcgcctctactccaaaatccggcccactgagtgtttgaacaagacatggcagaagaaggttggccccgatgagccagaaccatctcccaatgtcaaggccttgattcttcactcgaaccagcttactaactgggtcgctgaaatgattctcgctcaaggcgatgtcaagaagcgtgtggtggtcatcaaacactttgtgaacgtggctgatgtatgtattttctatatctatttgatcttgaccttactaactcgactatacagaaatgtcgcaacctgaacaattattctaccctgacatccatcatttcggctcttggaactgcacccattcatcgtctaggtaggacatggggccaggttagcggacgcacgtccgctgttttggaacagatgcgtcggcttatggctagtacgaagaactttggcgaatatcgagaaaccctacatctcgctaacccgccctgtattccattcttcggtatgcatcacaaccatttcaagcagaatgtcttggagcatctcacccctttgatttgactaacacatcgtaggtgtctatcttacagatttgaccttcattgaagacggtattccgtctctaacaccatcagaattgatcaacttcaataagcgggcaaagactgcagaagtcattcgggatatccagcaataccagaatgtgccttatcttttgcaacccgtcggcgaacttcaagattacattctcagtaacctccaaggtgctggcgatgtacacgacatgtacgaacgaagtctggaaatcgagcctagggagcgcgaggatgaaaagattgcaaggtatgctgaagcctcaagcagagacaagagctccttgttgtttgcatccaccgttgctgttttgcgataatcttgtttttttctttttcttaaaaactggcgtttggcatttgcccggcgatacccaaatttgacctattctcttttttttgggggccaagacaacgacaactctgctttcttttttttctttctctcaaaactgttcggctgttgagactaaccgttttggattctgaatctcgtagattactatctgagtccggcttcctgtaacccgtgaagatccctgtcgagttacatcccgcggcgccaccaaacaggttcgacaaatgcgccattcgcgctccaatcgacgttcgtgtttcaccacctcgtgaccgttcaggctatcctagtctccacaccacctcaccttttcacctctcagatctcacttttcagggatacttgcaggttgatctatcgcatgcatgtgaatgtctcaaagacccacacatgtgaacacttattctcgatgcagttacattcggtctcggcatttatcattgcaccggcgaatacggagtgctccgtatattgattctcgatatagcgcaatagagctgtttgattggttcggatttcttgtttattccccccttgtttccttctttcgtctcttatctccccgatgaggtcacctgcctctgtggccatctcgaactcacctcttctttgtaccgactgtgacatatcctggccattttctcggcgtattttgccttggatttcagtttcatttttttgtttcctttttcaacatatccccttgtgttgtcgccaggttagggcgacctgcttttttcttttcaggcctttttcctctacgctgtattctgaataatgaacgtcacgaatgactcgagacttttgttcctgtctgatcgatgttacccggtggagttgacttggtacttttaacttcattacatacagtgttctactacttgttcgattcccgcccggaatattgcgtattctgcgccaatagagattgattaccttggattgtcttagattcttaggctagcggatttactaccgtggacaccaccctcagacagggccagtatttgcctttgttgcccttgcttgagacggctacaaaaggtgagacatgaagtcgtaaattcattcatttgcaggaactgcaattttagatattctatgatcatggatcgagaaagatcgccgcacatagcaagccccgagaaattccagcgaatatggtgatatcaacccgctgagctccaaatacaacagttcaagctaagtaaaaagcgtggcagtcatgtcaatattttgggatcgtggacccctcatcatatgagctggatcactctgtcgaaggagtttggtttccgatgccgtgaaacagtttcatctttgtttcggatgctatgagacccttcacttcctccgcaacaacccgctgtccgccgcggacaaccttatccagctgttgatctttgctgttgacgccacccgccctcccgcccgggggcccccnnnnnnnnnnnnnnnnnnnnnnnnnnnnnnnnnnnnnnnnnnnnnnnnnnnnnnnnnnnnnnnnnnnnnnnnnnnnnnnnnnnnnnnnnnnnnnnnnnnnnnnnnnnnnnnnnnnnnnnnnnnnnnnnnnnnnnnnnnnnnnnnnnnnnnnnnnnnnnnnnnnnnnnnnnnnnnnnnnnnnnnnnnnnnnnnnnnnnnnnnnnnnnnnnnnnnnnnnnnnnnnnnnnnnnnnnnnnnnnnnnnnnnnnnnnnnnnnnnnnnnnnnnnnnnnnnnnnnnnnnnnnnnnnnnnnnnnnnnnnnnnnnnnnnnnnnnnnnnnnnnnnnnnnnnnnnnnnnnnnnnnnnnnnnnnnnnnnnnnnnnnnnnnnnnnnnnnnnncccccgcctcggggggggggtggcctccattccacgtgcggctttgcgcactttttgactgagatccatgatctgcttgttaccgaaatcacgagaggtgaatagcgggctctggctgagagtcgcgacccagtacttgttccatagaagggacaatatttccgtatcaagggtgcttttgaaatgactgacatcaagagagtagtattgattggcatgcgcaccgaagtcttctgccttcccgagcggaatagtctgatactcgtcatcctcatgagcctccttctgcggggtaaagttcgatggaaatgtgcggaaagcgccgatctcaacgcgacccgcggagatggtacggtccgggtcgatgacaacggcgacaaacggtccagtcatttgctgtgtttgttgagtggccacatcaatcccagacagccagcacccataacccggatgactgtgataccatccgacagcattctccatccgccccgagtctcgacacgactggagatatgataccatgtactcgtttgcctcgtcctgcgcattcactcgggtttcggtgccttcgactggcagccggaacgcatctgtcaccacgaaggtgttcggtaagatgtagccttgcatcagacccataatctctagtgagccacccgagcgggcatgcatcaccatcttcaatagtgccgaagcggagattcgcacgtgcttgaaatagtatgggtcggtggcccatggtcgctcctcgttgagggctttttctgtatcggcattgtattcgtagagggcatctcgttgaggatcaaacacgcttatcgcattttccagctctgtgcggggacattagttaattacaagctggctcatatcagtatggaggtactcaccccaggcctgctgggcagcctgcattttgggtggatgggatagagaagacagtcgaatggtaagcaatgtatcgcaaggatcagagtactttaaggcaaggactcgggtgataatgtgagttctgcaaggaccggagaataaatagtatcagggctgaatgcatgaagtagagaaggccgtggggttgttcattgattggcagtatcgggcggtggggcttgctgagtcagctgttgcccttgacgacggtctcacccaaaacaccacccacttacgccttacgaaacttgatgttatctatcatctgcgatctccgaacgcccccccccctctcataaacaacagtgttgttcgctttcctatgtggctgccctaagtgctttcgcaaacctccactttcgtttatttccgtcgcaccttgtgtgctgagaaccctgtgtgtcaggctctcctgttttgatcccgacattcatcaccctgtcgcagcttcgctcggcattgtatcgttcatacaatattttgttatcaacctcgacttttgtcatctccgttaagggactttcattacaatggcggtagataccagctacctgaccactcaggtcaacaacatcgtcgcccagctccatggtatttacgacgaaattggagttcctgcgcgggagcgcgagtctcgtgaagcagaggtaagcttgctctctgatataacaatggcattgtcgcgtggctaacagagtgatacagctcttcagcgccctgtcagagaccttgaacaatcatctgaaggttgttgatgagtgagtcgcatccatagacagacccattggaggcttgctaattatatttctagggagagagaagatatgacgcaagaagcggaacgtctcattacagctattcaacaaatggaatcgtccctgagcgatgaacgggccaatggccaatacgagcttaaccgcgacgaccttcgtgtcacttacccacttaacaaatgtattgcattcttacgcgagaagaacgactcgatgagcaagctgcatcgggaacgctttgagcaggttaagagtgagtcttatctgtgtggtgtgtcgctgatgctcctttactgacattcaatagaacttgtggacgcgcttgaatcatactcctctcacctcgagccatcatttgttaagctggaacttcctcctactgcaccagggtcctcgattcccccaagcttcgacctttctcctatgtatgtgaccgcattggatgccgaattcactcatgtctacgaagagtaccaccgccgcattgccaaagtccaatctgcctgtgaagaaatgatcaagctctgggccgagctcggaacgccccaggcgcaaacagattccactatcgtgaagtgttatcgcgattcccctgagcaactggggctacatgaagatgatgtcgccaacctaatttcgaagcgcaataaattggtggaagaaaagaaaagccgcgagcgcaagatcaacgacctcagagctaccgtaatctctctttgggatcgctttggtgtggaggaggcggatcgcaaggcattcctggctgcgaaccgtggctgcggtttgcgcataatcaacgacctcgaagaggagttgacacgcctcaacgaacttaagagacagaatctccacctctttgtggaggatgctcggtgccgattgcaggaattatgggacactcttttcttctccgaagaggaaatgctcgatttcacacctgcattctccgatgtgtgcagcgatgctttgcttgaggctcacgaggccgagattacacgactggaagctcttaaggaacagcgcgctcctactctcgaaatgattgacagacaccgcactcttttgacagatcgcgaggcacttgaaacatcaagccaagatgcatcccgcctcatgggccgcgggaacaagggagagaagcgtgatcctggaaagctcttgagggaggagaagatgcgcaagagaatcgccaaagaattgccaaaacttgaagctgacctacggaaggagttggaatattgggaagacgaattcggccgacccttcctagtgcacggagagcgatatcttgatttgttgacacctgtaaagtcaatgcttccaccacgctcaaagacaccatctgcaacaccctcagctaccaaagcaagcacaatgagacaaaacccacccgcccgccctgcaagctccatgagaggcctgcctcccccccgctcagccaccaagactcccactagcagcggcccagttaaacacaacaccattggctacggtgcctctagagccggtgccacctcaagagccggtgcaacatctccttcgaagcttcccgcccgtgtcccgctgggaaacatgccccttggaaccaactcccctgagcgtcgtatgcagcccggtgcctactcgtctggtacacttaatggaaagatgcagccccctcgcggacctcccccacggatgcgtgcgttgacgattgagtcaagggaagaccgattcagccaccttatggagccaccgcgctgcaatagcgccatgtctagtgcctatgtgcggcctgttagcccggaagacgtttatgatgaccggcagcgatctttcatgagcacttcgggattctccaactctcaaagatctactggattctcccattcatctcactcttcacactcgtcactgtctttgaactctagccaagtgttcccacgacctaacccttacctacaccacgcagctccaccgccagctgcccgccaagtctccaactcctctacagtcaacacaacaacctctggatctgaaaattgggagactttcgaggacggctcgggatcagaagccgatcccagtgacatttactattccaaactccgtgccgcaaacggagggaaacgatttgcacccgaggatggatcggatctcactggcaaaaagaccaagggtattcgcagtgtcagtccagaaggtccgcatcccgggcaggtcctgcgcgttgctggcagtgacaccgagtgggctgatgactacgaaacttattaggtgttctgccattgcttccctctccataatgcatcccacctcttgcacctcatttctcggcgccttggaagttcaacggtgttacgcaaccgttgacctttgatgatcccacgactgaattttgcatttgcacggttcatgataatccttggtttccctttcatgactgagcacccttagattccttatgggcaggtttctcctctctctacacacgctaattcccgaggggccgacattcaacttcttttcctgtccataattacgagtttatcatgtcaatcttgctcccgctctccttcatctcgatgatattgagcccaaccctgcgcctgactgtgtcaggctgcagccctctgaggattcctgtcattcacgcctttcccgactgacaccctcgctgtttcaattgccactgagtttaatcttttgctttttctggtcttcttggcatggtgttatctttaattcctttctctgtcacttattgttttcgttggcttggtgcttaaggctcgtttattcccttttcgatctccggttttgggagtcggattttgtccttggttttcaccgtttttctatgtatttgtcagcgaagtacgccgtacagtgttttgatatatctagtgttgttaattttatcttctggttgttcaaccttttgttcaattcgataaatagcatggatagatcggtgcataagccgagacacttgacttaattagggctacccatccacatgactccggtaactaggacgacttggattgcagcccgaacaacaaggcaagagataatatcgccgctcacaacggactccgtacggagtgagcggtgttagcggtattcgtcattaggccaccgtcaaacaagcccctggtcctttgggctcagtttcatccctcaaattcaaattcaccagaagttgttccaccacagtagctgtcatggcaccgactgtggttggtgacacatgtgacagcctttttgggcctgtgatcagtcaacatgattgtcgtggagggttcgactttacaggtacatatctccaatgtctgggcgcctgggcagtctccacatatactgacatggaagcaagttctattcgaagcatggatattcaacattaccccagcagtctgttttctcctgctgttacccattcgcctgttccagctatctagagagtctttgaaagtaaaatcctcgttgactcattgggcgacgctggtaagtcttgctatcacttgtcggaccttgaaacgtctaaataatgctctatacaggctattgcggtagtattgtccggaattcatgtcgttctgcttgtgtttagtgcgacgcagcactaccccgcacaaaatgtgtcagttgcgggtgctaccctcagccttatagcggcaatttctattgttgttctgcttcatttagagcacagccgggctgttcgaccctccttccttgtctctgcgtatctgcttattacggtgcttctagacattgcgcgagtacgcaccgcctggctgttgccatatggtagagcatacccgacctgcctcaccgcatctctggccaccaaattgctcctcctggtgctggcaaatatcgaaaaacgcaaatggctgttgctatccgaacagtctaccgagagaactagcggtatctttaacaggggtttattcgcctggctcaatgaattactgagaaaaggacacacctcgttgctcaccagcgatacgctacctaacatccatgagaagctatcgtctagtgatttagccgaccgattttcgaaatcatgggcgctgtgcgaccagagtcgtcagcatgcgttgctgctggccgtcgttaactgccttcgctgggatattgctgctattgctcttcctcgactcgccttgataggatttagcatagcgcagccattcctggttggcaagaccgttacattcctcgagcaaactgaatcctcgatgaatattggctatgggttgataggagccaccgcgattgtctttatcgggattgctgtaagccttatgtcttcaaccacttatcccactatccgatggtcattggccgactgagtttatgacttaggtcactacggcatcttatgagcacctaggatttcgtgctacgaccatggtgcgtggtggccttatggctcttgtctatcagcacatgatggagctgccactggggagcaccgatgagtctagtgccatgtcccttatgggagctgacgttgaaatgcttgcggagtactttcactctacagtgtgcgaatcttgggctagtatcctacagctgggactggccgcgtggatccttcaaactcagatcggtgttgtttgtatcacacccattctaattgcaacaggtactttctctttctctacctatttgcacgagatgtgatgaccataagaaattaacagattgactagcttttaccgttgcttcttttgccacgggcaatgctgtgtccgttcggcagaagacatggctacaagccaccgagaaacgcattaatttcaccagccacgtcctcggctcaataaaaaacgtgaaattcttaggactaacagagatcataaagaaatccattgaaggcttaaggattgaggagcttgagatctccaagaagttccgccgaatccaaaccgtccgtgtctgcatgagtacgtatacttggaagtccatctacggatagttttattgaaaatatcaggatcaactgaccagtctattcagtaaatcttccggtgattattgcgcagtttgccactttcgcgacctatgctgtagttgcgaaggtgcaagggtcggagggtctttcggtctcacaagctaccacggccctttcactaataaatctgctaatcactcctctcatgcatctattgttggcagttccagatgcattcgcatcaatgggatgtctgtatcgagtccaggacttcttgaaacgtccaaatattgtcggtgagtagcgctaatactcccatacgtgctactcagtaagacgtacagcgaattaacctcatttacgcacagaaagaaggaaattgctccagtcagaagcagaagctctgaatttacctactaattcattcgaattcgaactttctaactatcccggggctaggggaatttcctcgccagagaatccatctgacgtgctgatctccctgcaaaatgcctggtttggctggaatgacccttcttcggatagtgctggtatcacactcaatctgagcccctcgcagctgggtaccctagttgcaattgtcggtcctgtgggaagcggaaagtccacgtttctcaaaggcctcgcaaatgagacgtccattctcaatggtgacgccttcatcaagtacccagatctagctttttgtgagcaaactccatggctaaccaatacgacgatccgggaaaacatcattggggagaatggatccgcggcatttgattctgattggtattcgaccgtggtgaacgcatgtgcgctagattccgaccttaaaaaaatgccagcgggcgatgagtcgttcgtcggtagcaaaggatctaagcttagcggagggcaaaagcaaagaatcgtgagtacaaaccatctttccctctatatgggcggtccggcccggggataatagcaatggatttgtgaactgattttattataggccatagcacgagctgtctatgctcgcaagcgcatcgcgtgcttcgatgatactcttagtgctcttgataattcaaccgctcggctggtatttaacaatgtctttggcccgtccggactgctgcgtcgactgggctgtactgtatttctcgcgactcacaatggtgcgctcctcaaccctcgatatctttatcttgtcacttgtgtggtatatactgactattagcagttcaatatctaccccaggccgactttatagtcgtactcggagagaacggcaatatttcggaacagggcaccttctctcagcttctcagtcacgccgggggatatattaaccggctaggtattcaaccagaacagattgagaaagaaaagatgcaagatgacattccaactgggcttctagagactagtgaagtcataacaagccgcctatccaccccggcctctatcgatgaatgccgacagacgactgatattgctgtttacaagtactatttatctgctatgggctggttccgagtctttgtgctgagtttcttactggtggtgaatggtggtattggtggattacgaagtatgccaaaattctcgactaataacaatgctgtatgatgcttatctttgcataggtgcttggattgagatctggtcctctagcaccgacagcgcttcaagctcgggattaggctactggcttggagtatatgggacattgtccttcgtcgaagccacttcaatggttcttgcggtatagtaagtgaaaaaaaaaaaaattcggttaaagcttccatgctgattgggttctatctaagttggacctgggtcgtcattgtaccggccgcgtcgaaaaatgttcatgctactgtgctgcaaacttgcatgaggtgaaattccagttcttcactaatctaaatatcggccaactaacatattcagtgcccccttgtccttcctatctcacgtagacacgggctctctcatcacccgttttagccaagatatgaggctagtggacatgatcctcccccgaggttttatcacgacaggattccgtaagtgcattcattatacatttatttaacgtgtttctctaacccgagagatatgaagaactctttacggtgctttcacaggccgcaatcgccctagctgcattgccatatctggctgtagcccttcccttcctagttgggatgttagtgctagtccagcgcttttacctgcgtacatctcgccagcttcgactgctagagtatgtttatctgtgccaacaacgctttaatttgatcagcatgcttgtgccttttagcaaactgacaaacccttaggatcgagctcaaaagccccctgtacacccatttcattgaatctctcgctggtgtagttaccatccgtgccttttcatggactactgcttctacgtccaaaatgttgtacttacttgatagggcgcaaaggcccttctatcttctattgtgtattcagcaatggctgggcctggtactgaagctcatggtgactggtatgacgcttattctcctcggagctgctatagctctgcgcggacaagtgagccccggtttgttaggtattgcgctgattggaatgatggacctgggggaagtactctcatacttgatccagaactggacgcttctggaaacctctttgggtgcgattgccaggattaaggatttctcggaagatactccaagtgaggaacaagatgcagtctatgagcagccaccagacgcaaaatggccaagtcggggtgacatctcattcgttggcgcagatattgcatatgagtctgagaacgcagagcccgtgttgcacggtatctgtctggatattcgtgctggggaaaaagttggactgtgtggtaggaccggaaggtgaggaaagacacttcagtaggggggagaataggctgactctcttatagtggcaagagcactctggctctatcattactccgtcttaacgaggtggtttctggccaggttcttatcgatgaggtagacatatcgacggtgcctcggtcattgattcggcaccggatcagctctcttagccaagaagccttccttttcccaggtactattcggcagaatgtcgatcctttaggcattgccagcgatatcgatattattgaagctctcaaatgcgtcgaaatctggaatgctcttatgtctgcgacgaacagcgacgcccacagcggagggttgctagatgtaatactgactgacacgactttgtccgaaggccaaaaacagctattttgcctggctagggcgcttctcaagaagagtaatattctcatactagacgaaccgacaagcaggtatgtaatttctgtctttttgcttctggcaacacatgattatgcgagcaatgccaaccattcacaatcaagtctggatgcagagacagatgccagggttcagaaagtcattcgccaggagtttcagagctgcactatcattatggttgcgcatagagttcataccatgctcgactttgaccgagttgttgttctggatagtggtcgaatcatagaagagggacatccttcggacttgttgaacaaggaaggcgctttctcaagtctgcatcatctggagcagtcaacaggaagcaatcaggagctctgattgatgggtctcatcaagttgttcacaaagacttacagcttttagaccgcaatacactttgtttttccgctctatatcagtagacaaatcatagctctggggatcagggcatctgctctttatagagttatttaccgcaacggacaacctgctaagcaagtgattgaaggcatcaatgtcttgtcttcagcaaaaatattggaattgggtcatatcggatacagctatagtacagtcactcaacctcttaattctacattaccggctagtcgcaagagtccccatccaactctgatcttcaggcaaagttcccttaggaactctctggccagcagaaggaacaagggactgtgtcaacgccttggcgtcctgcactcggcgaagtgtctcatctctcccaagaactaccatagtctctgagattccaggcccaggcgcagaagccaacagcgcccagcggaggtagtgatacagctccttcttgaatatcttccctgcgttcttcgagccaacgggtgtctctggctcagacgtggggaaaacaacgctttccgcgccttcatagctgttaatgttgtcgcggtgagtgtcgatattccaggccgcggatgggacaagggttaaggcggctgctgcagtgtgcagcgcttggattgggacttctggggaggattggggtgaggccggtttgtaaggagctctgtccagtttgggggtaaagaagttagagttacgctgggcgaactcctttgcgtttgtgtagttgttgacatctgcgcggatgaggggcgcgatgtattcggagagagtgcgaccgttgaggatcgtggtgctgctaggtgtcagctattaggtactatgtaatacacgcgtgaattctttacggctggtggctgacttacagtttgtcgagagggtagctttcttccacgaccaagctcaccttcttcaccatctcgtcgaactcaggtccgccgcttttgaccaagcgttggacatgtgccttctggaggaactggagtttttcaaaggagacaaccgtatttcctcgagtaattttcaaattgaactggtatcaatattagcagggaggttggcgtgttttcgggggactaagaagaacatacaatctgttccagtttcttcagacttaacacatcagacttctcggaatgcgaccagcctagaagtgaagtgaagttcaccaaggtggatgggaggatcccttgcttgtccttgaatgacgagaggtcgatatctgcgttgcgcttgctgagcttttgcccacttttgtcgacgagcaaagggacatgagcaaagcttggtggcgtccatttgaaggcattatatagcgccatgtgcataggtgtcgatgacatccattcctgatagacgttagttcagtatcttgtgacttgatagctacagatataataagtaaactcaccgtccctcggataacatgggtgatcttcatgcaatgatcatccacaacatttgccaagtgatacgtggggtgtccatccgatttgataaggactgggtcattgtaaacacggtcgatgaaatccagcttcgagttgttctggtgattctggccggatttgccataaaccagatcattgaacatggggtattcctctacttttagtcgaataatgtgtgcctctcccttggctgctcgatcttctgattcttcggcagatacgtcgccgcatttccggtcatagccaggcggcagtcctgcctcgctgcggtgacgggcgatcgaatccaatcgttctgcggagcagaagcatcggtatgcatggccattggcaacaagatcattggcatgggactgatacaaagcggttcgttcggactgcatgggagcaaatattagagattaatttcttgcgacaaaggagtgatgcctcacttgtctataaggtccatagggtccaccaacgatgggacctgtcaacgaaacgagagtcagcaatttccctccatttttagataagtttcaaactgaccttcatcccagttcaatccggcccattggagatcatcatagagtcgctgttccgccccgggaattgtccgtttctaccgtaatcagtcgtagtccacgcaacggagcgcaatccacgaacctggtccgtatcctcaatgcgcaacagaaattgaccaccggtccgcttggccagtaaatagttgaagagagctgtccgtagggagcctagatggaggtatccggtgggcgagggcgcaaaccgcgtgcgcgcagggccattcggcagtttgttcttcaaattaggtgcttgagcagccggagaagaggagaaggctctacattggatgatccaagatcgcctggcgagtagcccttggggacatctcattgcgaaatagaggaatggccgatctttctgatatgttgtggagttgcggagttgcggcgcggagctcccgaacaaaatttctcaacttctttggatcaacaactcccgctctcacttctcgttcaccaacctctctcttttactattgggctcaagtcaacggtctttttctattgaagaaaattccgatcgtgttttctacaaaataatcactgaaaagtacgttggaaagttgtgtgtcacttgagactctactaacaatgttctcagtggctgcggttgaagttgacctctacggtgtgtgctcatttgcgcagatcaaccatacaggaataccatattaatcagttattcattcatacagaggtcctagagatccatgaaagctcaactaaagatgatatccgcaaggcataccgcaaggcaagacgaacccgatcgtctccggattccagcgatactgacagccggctttccaataggcagctttggccaaccaccccgacaaggtccccgaatccgagcgcgaggaagcttcaatccggtttaaggctgtgcaagaggcctatgatattctttacgacgatgacaagcgacacctctacaacacacacggcatgtctgccttcaacggctcgggtgagccgggaatggcaggacaacctgacctagatgacttgctggcacagatgttcggcggcggcatgggcggtatgggtggtatgggcgggatgcctggcatgggaggaatgggaggaatgcccggtggtcgccccaacaaaccgcgcaagagccccagcgaagaacaagattacgaagtcaacctggaggatttgtacaagggcaagacagtaaggttttccagcgtcaagaacgtcatttgcggacattgcaagggcaagggtggcaaggaaaaggccactgccaaaaagtgctcgacttgcggtggccagggctacaaggaggtcttgcagcgcatgggccagttcgtgacccagcagacggttatctgtaccacatgtaacggagagggctcatatttcgccccgaaggataagtgtaagaagtgcaagggcacgaaaacaaccgaggcgaagaagatcttggagatctacatcccccgaggcgctaggtaagatggcctttttttctatctaacggaatcacatgcttactgtgctctaggcaaggagaccggattgttttggaaggcgaggccgaccaagtgcccgatcaagagcccggcgacattgttttcaaagtcgtcgaggaagaacaccccgtgtttacacgagccggttcagatctgcgtgcaactattgaaatcactcttgctgaatccttgaccgggttctcccgcgtcgtgatcaagcacctcgatggccgtggcattgagctcactcaccccctcaccgccggcgctatcctctcacccggacaggtcctcaaggttcccggagagggaatgccgatgaagcgtgtcgattcccgtggtgacctgtacttggttgttgatgtcaagttccccgataacgggtggaagcccacctcagagatgctggagaagctcaaggagattctccccaaacccagcgctcctatcaaggccgacaccgtggacgaagttgaatacgaccccaagggtcagatcgaggacttcggtgcgcaggatggccaggacgcagcaggatgggaagacgaggaagacgacgatgaaccggcgcagtgcgcaactcagtagaattcttgcatagatggcgtctgggggtttgaattaatggggacttgtgaatagaacaaccctcttggcttaaaaacaaaaatacattgtataccaatgtaatcgtctttgcagccccacccgcgttcacgggctgcgtctattttcattattatacatagttcgaaggttagttaagagataccaggttattgaaatatcatcaccaggtaccttttgtatgcgtgtaccatataaaagatacctaatgtgtgtacctataataatgaaacagccgggtgaggatggaagacgattacatcgacgtacaatatagggaatacggaaccagttccgctcattttatgagtggacaggtggatggaccttgtacatattattcagatctatttatgtactcgtcggttttgttttgtttttttttacaaatgagatattcaacttatcccgaggccacggaaagaatccggggtcggactccgcggtcgcgatgtcggactggggtcggcctaacacctttcggcttcgatatcggctgctctttctttctttaacttggattcccccctctacataccacccactccaggcctagaaagctcacttccaatagtatatagtcgccctaatgaattagtctgtaatggaaaaacggaaagaaaaacacatggcaagtacacctgaattgacggattttccgagtgtgtaccgaggctatggtaaaagatgccggattcgtcgcgacgatctcaaggttcggggtaggttccctgtgtccgagaaaagcaccccgtggcaggagatcttccagagcgagactggtcggttgaatgagattatggttctgtctgcttgacgccgctaagtctgcacgatgctgtcgatcctacacgatgctgctgagtatgttgcgccgttggaagcctcgatgtaaacaattgaggttcaaactggttattgtggggaaaacaagcggctgtggggaaatgaactatggtaaatgcgggataacgaacagcgctattccgcgtgttgggattgtataccatccccacttgagatgatagtagctgctgccagggacgcactgtccaatcacctaagtgcattgggggcattggaagaagaggaggcaaccgcccgtatcggcgaaagcgaatatccaattcgccggctatagacgggtccagcccctttgccgagtcacttccccgggccggggtccgccacactttcctggttggatctagtggtaaccttatttctccgtggatataattcctgaactcgggggagactggtaatgccaacgttaaatagaaactgagtccctagagtctctagatatctaatagtaatggggctaataaggatatctcaaagggctctgatatagaatatagcactgtagaggcgatgggaagtatgtgtcttcttcttgattggccaagccttgttcttaattgggtaactcaattttccaagtctcccccagctttttacgggtctcttcaaactgtgacccgatcatttgtccttcgacgtccatataggccaggtggatgcagttgatggaccaaacagggacgtcacctcttcacgatcctccgaatgtcggaaattgaagagaatggggacgatggatccggggtacgcatttccgattttccagacccaattggaactaagacgatatatgattacttggtcgtatgcgggggtcgcggggtgtctgtgctctccagggctgtctctagggttataaaatctaatccttgtcccaacacctttttctctaccttcatactctggaaggaagaactgaacacagtccggactgcaaaatgggcatattcaagaatagccgggtctatgtactcgccacagtggcatatacgggttcattcctattcggtaagacaaatctctaccattgccgatcagatgcagcatgctgataagtttcccgaaaaggatatgacacaggtgtgatgggaagcgtgctggaacttccaagtttcaaggccgattttggactcacaactggaggttctggtttttcgactgccaatgccgaagtctcatcgaatgtcgtttcccttctcactgccgggtgtttctttggtgctatcttcggcgctatagccaacgaacggtttggccgtcggtattccatcatgggattcctgacattcttccttatcggtgctgctgtccaaaccgccgctaccggcacgctagcctatatgtatgccggccgggtgattgcaggtttcggagtcggaggaatgtcagctatcaccccaatcttcgtgtctgagaactgcccaccggccattcgtggtcgtattgctggtctcttccaggagttcctcgtcattggtatcactgtcgcatactggctttgctatggcgtggcagagaccctccccgccacaaccagacagtggcgcatccctattgcattccagcttgtgcccggtggtctaatgatgattggcatgttctttttgaccgaatctcctcgctggttagcgaaagaaaatcgtctcgaggaagccatcgaagcccttgcatatatgcgctctgagccggtcacaagccttgtggtccagactgagatggcggaaatcaaagcggccgtcgaacacgaagtcgaatcaacacagggcctcacttggcgagaagcattcctacctggcaaccgtcttcgctttatcaactgtttcttgattatgttctggcagcagtggacgggcaccaacagcatcgggtactatgccccccagctgttccagacaattggagtcaccggcggtaacacgagtttgttcacaacgggtatctatggtattgtcaaggtgatatccactggaatcttcctcatcgttggtatcgacaaggtcggtcggcggtggtctcttattgctggcgctatttggatgtgcacaatgatgttcatcctgggtggtgttctggtgacctatcctccggatcctagcggtaacggtactctttcgtctgcatcgctcgccatgattgtcatgatttacctctacgtcattggctattccgcatcgtggggaccgattccatgggtttacatttctgaaatcttcccaactcgccttcgttcctacggtgttggttgcggatcggcaactcaatggctcttcaactttgtggtgacttatgtgactccctccgcaattggcaaccttggctggcgaaccttcatcatgtttggttgcttctgctttatcatggctatttgggttttcctcgtcgtcagggaaacgaagggtcgctctcttgaggagatggatgttctctttgagaagttccatgcccttggccgtttgcctgatattgaaattgcacaggaaagaaagctttcgtttgatggtgctgctacctcggttcataatgaagtacagggtgttgagaaagaggattatgtgaagacataaagagtgtacagggcatgtttgtgatggtctgatacctgtttatgtatatagttgttttatggagtccaattctacgtctatttggttatgtgtgtgcataaacctagtcaattacctgtgtatattgatcgaaatcagaactggtcggcggaaaatatatcctctcagggtgcacgaacatctcgactagggtttacaagaaccttcagatgcgctcttacaacatatatctccaagaaggacaatagaagactcaacctatcgaaagttagacagaggtagctacgaggaataaatttcgcaggagatgatggattcaaatatttatccgtcacattcataatgtttaatccatgagagatggaaatgtttctctttcctttcctcatacttgctacctatcaatcaaaaatccttgactattggtaaactactatataaaggaaattgcattcgaaatttacgaataggaaatgttttctgttttgtttcgtgttattgctgttctctccggccgttcggggcagcattataaaagctcgtcaatcatctattccctaattccagagtcgaagccgttgattctctcaataacatattttatatcaaatttatatatagaaaagtatttagttgttgaggatcagatgagaaacaaacctcacggatgaatcaaaattacctaatcactgatatgccgaggtccgtgtggagagcatgttatatcaaggttcaagcataaacacatacacagatattgtagaatcacgcttgaaccaaatcaaaccatcccatcaggaaaataaaatggccaccgcagagtccaaagctaggaggcaacgcaagcgcagcgactatggcttccaccaagtacaccagacccgatggtcagtaccagaaccaccgaactagcagccacgaaagacaccgacactaacacccacaggttcgacaacgacatgtacgcacacctcaataacgcagtgtatacgcacctcttcgacacaattgcgaacacgtatttaatccaacactgcgggatggaccccttcagcgtgaacaacccaaccccagcgccgactcacggccagccctccaatttcccctcgccatcgaacctagaaagcaacgccaaccaaatcggcctgattgtctcgacacaggctgatttctttggctccgtgcgcttcccggatctgctggtggtcgggctgcgcgttaataagcttagcaagtctagcgttacctgggaagtgggtattttccgtgagggtgaggaggatgtgaagatggttggaacttatacgcacgtttttgtgttgagggagactatgcgggttgggaagacggggatggaggagcggactagacggggcttggagaagttgcttgttagggaccaggcgaagttgtgagggggttagaatgtcaatattggccgctgggctgggcttgtacatagttttcttatcggaatataggtagccccttgcattccagggcagtcgtctgattgtctggttatagatagggattctaacttgagattgatcaaatggtccctataggaattcgagattcgagagaaaataagcgagatatagcaagacaccttatcttgatttgtatggtattttgtcttaggaatgtgagacgccgtgaagaaaagacaaaaacgtgccccgtgtagatcaagtagatcatccaaaaaaccctagatcattaaaagtctaatctaacctgaaatctatgagccaaaagaaaacccgaaaacatatccgtcgccgtgaccaaaaaccggaaccaaagacttttgtggttatcatgagaataaaagagacacgctaaatcgcttcgcaatatcaaaacaacagaatggtaatacaagtatgatgaaagctcaatcataagaaggattgtcatctgacaacctcaagagttgtgggtgagacaaggtgctcattcaaatttgccagcaatgatgctgctgcaacgggacacgctgacactgctcggaggcgaggcgccgcggcggatggtgtatccatcttcatcgagccaccacttggggtaagggccaagaatgaagttgccctgagcatcccagccagcgacccattgaatgccgtcgtcaaggaggaaaaagcgaagcttttcgggacggccgcccttgtgcagcggggcgtcgaaccagcggcagcgctcctccagttcggattcaaacatgtaacggtggaggatgcgacagtagactagtgcagcagggactttttcatcgttttcgcacccatcccgatggatgaggtgccatccgcgacctttgaggaacttgtatgttcccgggacgggggaatcccagtgttgttctttgagattgctgtcacggtcgcccttctggaaccagtaggtagggcagaagatggtgcgcgcacagaggaagaggttgggtgccatgattgaggatggtatcaatgaagaaaaaaggttatgtgcaaggataacttgtccacgaaaatcgggggaggagtccaagttgatatagaaacagcactggtgtacaaggaatctgaagggctagatcgggctataagtcgacagccatggtgaaaaaaataataaaatatcaatcgggtcgaaatccaagttgagataggaatttgacgggtcttccgcgttcacgggagcttggtcaaggaccgagaagaactttttcaggagacaaagaatgcagaagggcacacttggcacggggttgtgatccgaggcaaggactggttgggaatgtccagttcaaacagcactggccagacagtaaggtgtattccgttatcgatgcggtgagcaggggttggagtgttttaagtcgggaaaaggggtcgtgataagcttgtagctttacacgacggaacagcctttgtgataggaaattgaggagggagggtggaaggcgaatagggagagttcaacagagcttggacgtgcagcaatcggcaacacgcagtagcacgcacaacgggtgttagagctcaaccagagcgtgtgctagagatagggcatttaactggaggaatgtcgccatggtgatgtgaggaagatatatataaaaagggaaaatacgaaaatccagaaatccggaatgtgtgtttggatatatttggcggtcagatgtgtaacagggaaaaagtcaatcgacccgctggacagccacaactggcctgccccgagacaccgggatttttccgggctgacccgcacagccttgagtggctgaaaatggctgaaatggctgaaatggctgacatccggtggattagctaacccgctgacctcagagattttcacgtgcggggactagccgaggcttggcaatcccatcgtttggcccggggatttttctccgtctcccctggttatcctctttagggccgatccttttcctttgctccgtacggcgtacaccgtcatggcctccccaataatcgttatggaccgttctgactcaatattataatcaataatgccctcgaacacttggcatgcattcctaacgggaaacttccaggctgcagaattcttcgtggcgcagttctcggcctcagccctatactactccgtatgtttctcggcattttaaggctggccgagtttattctggtctggactatttgatgccgatggtcttggtttttcattccccagggaagcgttccacgaccttcgattgaaagattagcctggctatgatcagcataactgttatggtgtgatgactgcatgccgcaccttttactcatcattatctaggcctgagacatccctgtccctgtccatgtgcatgcataatcacaattctgacttgacttgtcaacaaaccagaaatcatggctctgccacctggtcgagagcctcgcagctacaggcgatcgccaagcaaatccttgccaattttgcaatatgacacgacgcacggcgttaacgataagaaatcctttaataataattggagagaacaaaatcgacagtttgaatttctttgatatctgaaccctaatctttctttctttttcatgtcctcgggccccttgtgtgttggccttctttcaaactgccaaggtgagatgattttctctcatccacatcatttgcagtccctcgggccttttcgggtttcatgttccgtacccgggccaagcttactcggggctcatcaagttgagtacacaacataggtagtctaaagagggtttctaaaccaggacactggggaaataagggatacttagccagaataactgcaacatactacatacgtactcaataaaacaacggtctttacttgctcagtattacttccacggccaaccctaaataatgtacggacttgagataatgtgctgcaaataggtgctgtgatgagcacatatagtagaacattatgcgtccgttgtacccgatgtcaacgagatgacgtgaggaatgactcgactaaaagacaggagtcgtggatcttgctattaatttcaacacacgtcgagtacctccactcccgggatcaaggcttggatatatttacgttatgtacaatatgcctacatagcggtcgcccacgatataaaccaaggactaagacaagctctaagacataggaatactaagtcgtgtgagccccaattccactactccgtaccccgtatgtactcccatcttacccctttccttccaaaggcttacctccttccctctaagcggcatttctccacccaggcccaactcgtccacgccaacccaccacctccacaccagtggcgccaccaatccattctggcagctcgttgaggtcatcgacgttgtgggctatgcgtcaactggagcggaaaatcggcctagcaccaccgcaccgcaccgttacgtattacggaaaacgcgtcgagctggcccatcacggcgtccacgcgctgtacaacaaccccgacatgcatacatgatacgatgtggatgtctagcaagatggatggatatgaggactacgccggcgtaaagcatgttcggaacctgttggttggcatgtctcagttaagtgtcactcctgtctgcgatcatgcgatggatccctgcatccacatgtcgacagccagggacgctgcggcgccaaaagtaccctgtctgcattcagggcttgggtgatcccccggctttgatgccgctcatcggcggcgaagagctaaatataatcagtcgcgacgtcctgctgtctggacttggcgtctgcccccgagtaccttgataaagggatgcgctggctttatacgtcttggcgatatatagtgtacatcgagggacccggacccaagagttttcggtttttctcagtcttcccttcactccacaatctctcccccctattaacgactaagcagagagagagagagagagagagagagagagagagagagagtcacctctcgggtttgatcctcctgtcatgactcgatgttggtcctcgaaaattattcagatgtggaagacatggttgtctaggacgagaagcattctttatgttgtgcctgcggctgggggattcatggggcgaagatcattgcccttgttgtagaatactgatgggacagtgttctaaggccttgtttgtcattattagttatacagcccgagatagttttgtttggatagaactaaactactatcgctccgactgtcagctggatatcgccggatatttacataagaataatcaactcggtatctttgactcggctcaaccggcatgacaaactgcaagtgttgaatgatcgtaataggaccactcggattttgccgataaatagctcaagtgtctcgagcaaggaataggcggcctccgttggacttccgcacctgaaatatgcgccaaccgtgtgggacatcgctatcatttgctccttccgttcggattcgtagacaagcttttactaaggtttacgtggatcctcggtgacacgacggctggcgtcggcggccaatgacagagctcgtacgatgacgaagctttcctttccggtgggaaatgggtcgacgttacatcggggcggactgataactcgctgcttactactccgtattggacagactgttgatagtctatcgtagtggttggcacgcaatagcactatctcctgtcgacaatgggattgtctgtcctgtatatgaagatgatattgtccatagagactcccacttttgccctgcatctctatctgggctttgaccaatcatatacgtctgttaatattggccgattactatcatggcaggcaatatcttcggcgccaacgcgggtgctgcaaccgacgctcatctgcacgagaaagaaaaaatggacaccaatgaccctgccgtctcgatttctcgcgagcccccgtctgaaatttccgatggcaatcgttcgatctacttggattctagcatcaccttcgagaactatgtctactgggctaagcggtcgcgcgagattgaaaagcacatctcgactgacgatgtgggatttgcgcacttgagcaacaagctttttcgtaaaaaaaagtcggatgctctagtgataatgcagggagagattgaggaacaggatgcctccgtcatgaaggagtccagcaaacctaccaacacaatgaacggcgctagcacaagtgacaattggggcatcacggagacagaatgggaacaggcacagcgggccgcgcgaactgcaacatggggttcgatcttctatctcatttccacggacatccttggaccgaccaatgtcccctgggcaatcagtcagatgggcttcggaccgggagctgtactttacactgttttcggcgccatggcttgttattccggcttgcaactgtggaggatcttcatcggtcttgactcgactcgattcccgatgcgcaattatggcgatatggctttccgtatctacggagactgggcgcgcatttttgtgaacgtcctccaaagcttccagttcttcctcaatgtggccctgcttattgtaagcaacggacaagggctggcgcagatggctgtcggtgccaatggcaatggattcctttgtttcatcgctgctgaggtgatcttcatggccatcggctttttgctcgggcagatccgtaccctgcaacgcctttcttacttggccaacattgcggtctggctgaatgtcattgtcatcatcatgaccatggttgtggttcatgagtatccccctaactactcagcctcgctgactagctatgggacccaaaagggacccgtgcagacaagcgggtactggcctgcgagctcaaccctcaacgacaaagtcaatgctatgatgaacgcggttttcgcgtacggcggtgcaaccctcttcaatgagctcatggctgagatgagacggccctatgacttctggaagggctttatcattgccgagatattcatctacgtttgctaccttgtctcgggtatggttgtgtatagtgcgcagggccaatttacattcaatcctgcataccagggtaagtcgcatagcttccactgtagatcttgagattgctaacaaccacgcaacaggtattccaaactctgcctacaggttccagactttaggcaacgccatctcatttatcaccggcgtcatcgcagcactgctctatggcaacattggtatcaaagtcttctactccgcagttttccgcgacgtcttccgtttcccagaattaaacagccgaactggcaagtgggtgtggattggtctcggtaagctcagatatgcatcccctctatctgtgcacgcattgataatccctctagtgcctgcctactgggctcttgcctgggtggttgccgccgcaatcccgcaaatcaccaatctaacatccttcgtgggagccgcctgcatcttgcagttttcttacacgttcccaccaatgttgctggttgggttcaacgtccagaatgatgcgatactgcctgatgagatcaattcgacaaccggccaggtgcagcgcatagacagcggaatcaagagatggattagaggttacaagaagaagtttgtgtggaacacttttgatgtaatctactcgcttcttgctttgtctgccgctggtctgggaatttgggcttcggtcacttccatgcacaccagtttcgaggagggtaagctgacccatttcacttgtgcgaacccggctggatagatcaggtagaaggcaaggatggaggaacatcaatcctacaagtacggagtagttaatgatagacttcatattaaatcaagacttcatccattcctcactatggaccaaactcgagggattttgttcgagttaccccgagattgtaggaacgatgcgaatactgggtgatactcctaatagtattcttgatccgaaaaattatttagaatcaatatgtccatttacctggaaggtacaggacggcctccatcagtacggtagggggggggggtcgcattggccaaagtggggtcgctggtataatctcatactcctgaatgagagatatggagaaaagttccttacggaattatgaagttgtctcgatgcaatcttggccgagcggtttaaggcgccagacttaagtgaacactaactagtttagtgtgcgttctggtcacgaaagtggcgtgggttcgaaccccacaggttgcatacatttttttatactctcaaatattactatatttggtatatggcgttggtaggggacaggcaactgtactttccactgactataacaaccactaattttagtgagcgttctggtcagaaccaattatgttgtacgagcttatgtacgtcaggactttgtcctggcacacttttaccgcctttttatctgatggagctccaagtcctggtaactaatcttgcaactactataaaacaagtgaacaccaagactaggagtttatcagattgatgttgagtattatgatgacaacgagaaactaacaatacgttgaaagtggactataaaaaaagaaatgcaacctgtgggaatcgaacccacgccactttcgtgactagaatgctcactgaaacagtgaaagatgtaatctcttgagtctagcgccttaaccgctcggccaaagttgcgaaatcgatatttttagaatcgatatagtgttttttgaaccggatatccgtgaatgttcctacaggcaaaaatcgccgcgacaccaacaaacgctccttgacggcggcgcgagtaatacttatctcgccccgtcattaagaagttgaactgtttcataaagccaggttcccgttcttagtcaccgttgccaacgatgaaggtactatgacaggctattcgtactattatacaggaagcctgggaggcagtgccagaaagcaaagcgagggtatgcctcgaagaacgcaagacattattacagacaatggcggggcaccaattggtaggtggtatgaaatgggacatcttgtgtctcacagtatcctgcctaccgaaatctctagcagagtatcaagccaaagtttcatatagatagcgatgcggactatgtactagaagtggtatgctatacgggatttgatagattgcatatatcactataaaacttcgaaatagaacttcgaaaagcagcaaatctatatgctagggatgaaaccaaaaatcaatgcatcgagatgtcatggaagaccaagaccaaaacgctatgctcgtgaatttttcatggcaggtcagcagagtggtatcatgaagacaaagacaaagacatccggagaaatatgatatatagagaaggtattttcaagaaaggaaccctaaaagacaagatcattagttcgtagccgcagcagcctccgtggcttcgccgagagacacgttcattcctgcggcctcggagagattaaccagaccaacgccttccaaaagcacagagccagtctttgagtctgcggcaaagtcatcatcacccaaaccagccgggatagtcccatttccaatgacaacttcctcgccttcagcagcaggaacccagtccggacactcgcggggaccgtccatgcccgcaggaggcaagccccagcgaggcatagggctgcggtaagcccaatcaccatcgcggtcggcatacgcaacagcatgcaagaagatacccagctcatgagggcccgggtccgagtacagctcagtgccacagacttcacagagatttccggacagacgctcgcccttgcgcttttcatagtcctcagctgcggccacctgctcgcggtgcatgatctcgttgacaagcaccgggtcggtgcccggcgggacattcggcgccgcggtcaggtgtgtgcggtacgagaccgtgtcggggatttccgtcttacccatgagagataaccgcgcgacgatctcttcatcgcgctctgcggtcacctcggctttaccaagctcaggcccgaacacacggcggttggagtagatagggtcgttggtgatcggatggcctaagaactggaggtggacacggatttggtgagtacggcctgtcagcgggaaacagtgcacgatactgtagccctcggactcattggcgaatgccgggactggagtagcgggacgctgctcgtcgctagacgattctgtctcctttgctgcctcgggagggtagtaagccaagcgacggaacttggttgtcgcttctttaccggtggcgcgcacacggttgagacccagcttcgggctcacctgcatgattggctggtcgcagacaaccacgccgtctgggaacttgcccttcacgcgcgcgacatactctttctgcacggaccgggccttgagcgcggtggccattttctcggcgcccttggcatgctttccaatgaacataattccagacgtcaatcggtcaagtcggttgcatggacgaggtaaccattcggagctgcgctcggatcgcaggatttcgatgacggtgttgaagtggtatcgacccgcggcgtgcaccggtacgccagcaggcttatcaatgaccaagaggtcatcatcctcatgaatgattccgacaggaaggctagtaacgggcggttcgtggcggtggagggtgtgtgagatgacctggccgttcttaagtgtcgtttcggggcgggctgtcacaccgttcacctgcacaaggccatcctccagggctttcctctggtaattgtcagtttgcgattcttctacctgaagatccacatctcgacgcattcacgtacatagtattctggcttccggtcgcgaaactcggaagtgaagatctcgaccagctggcgaccccgccatcgctccttgcagttggtattataagtgtaatggtacggtgtgacacgacggaaaccaccgtccaaatagtaaggcgcaggccatggatcgcaaggggtcacgagcacgtcgggagtcttttcaaccggtttggaggggggtacttgatcgaccgtcgtgagggccatggtgggcaacttgagcttgccttgccgtagcaaataggccgtgatacgaggtgagtgagccagatgggcgacagaggtgccagacggagaattgaagagacctggaaagattcgagattccaaaaaaattataagaaaagttaagattcaacaagtcgccccacatgaacaaataatatcacattccacagagcatttattgtctgccccagaaatttaagtatgcgacaaccaatcatatcgatgataaggtggaaaagtaaaaaaagatatgcaacctgtgggaatcgaacccacgccactttcgtgactagaatgctcacttaaatcagtgaaagaggtaagtctcttgagtctagcgccttaaccgctcggccaaagttgcaagattgatatttttagtttgaagatattgctctatgaatagctgagcaaggcaagaaattatcaaacatcgatagttggactatcggatatagcactcataatcgcgccatggacgttcttcgaaaattgttcgaagagtcagttctcatcacagagccacaaatcgtatgttaatcgagacaggccgcttcatctttgccatctctcggctacggcatgagtttagcgatgtttagaaaaccaattaatttcaagaatagataagtctagtcatggtaaatcaacccttgaacgataccatacaaaaggctaccatctatcaggtaaatagttccagacagagccaacgcccaaattgaagagaagataggcagaccgtcactgctaacgctcagatcattgtgtcttcttcgccttcgcctttttctctcttcggcgcttcagggcatccggagtgtattcggtgtcaaggaggtagtcccaccagcggaagctgcttgcgtagttcccaatgaatttctcatggtggaggtcgtgatgatcagcaccagcccagaaaggcaagaaatggtgaagactgtaaggaaagtcatagccactgtgggcatcgatagcctggaacaggcgcaacacaatccagatatacatagtgagaatatgtaggtcaccggtgaaagcacaccagaggatcgggcagctgacagtcccgaagccgagaatcatcacttcaataggagaagcatattcggcagccaaaccaaatggtgcggaatactgatggtgaactttgtgaatcgccttgtagagtggaccccaatgaagagctcggtgcataaaatagtgccaagtgtcctccatgacgaaaaagattgcaatctgatatgccatagtccagggagacggaaaaggaatcgatgttgatagaccgcagaactgggccattgggtggaaaagcctagaagagccgttagtaatccatcgggcccgagaggcaaacgtccggtagaataccactccgtcgagggcaggaacgtaccagatttgaggaagttcgacggtgaagtggctcagaagcacaaacctggcgcagtcccattgctcgcgtagtgaaggcactttgctctgaagcagaatgttagtttccatggcagctggaatcgggttgatttcggctagtgccatgtgttaggcttgccacttacactttgaatcttgtatctcttgaagaaacccaagctatcgatgaagacccacggaagagagcggccgaagtagaccaactcgtggatgaggaaggacatgatgccagtggccaggacatcattctgcatccacgcataccatgcgacccacaatctctctgccacgctcagatgggtattgaatttggtgatatcctgatactggccccaataggtgccggggggcagcacggtagaattcctagggaaaaaaagggtcaatatgcgacaaattccacaaaagagtataattcaaccacccaggggggaaggagacatacattgtggttcctagcaggtcttgaataagagagaagaagcagaggctgagagaaggagaagactatttcgtgaagaggggagtgaaaaaagaaaggatctgggaagagcactatgtgctatatagtgtacagtactccgtatattccctactattaaatcccaatcctgttaaattggtataccacatacaggaaggttccaggcagccaaacagaggcgggcaaatgcgtattatccagtttggtggggctcggatggctatcggcccgtctgtggcctgacctttgcggcgatgacttttatattccggcctggtctcacctcctggtctcaccacttcgggaatggcctgctccgagtcatcgaaagcagcacttaatgggctaatttaagtatccaatcaaatttcttcttttgccgatatcttatccgggagagatagctgattaaaactactgtacacagactagcccagcaagccctaagaacctatacagcacaccatccacttcccaataaacaaccagttcatgtataattctttaccagtttcgcttcccagccaacgctacgaatattgctatttttcaaccttgatgcaaaacccaaccagcccaaaacataactacgctaaacgcctgataatgtatcccaacaatagacagacgcaacaacccaaaatcccaaactctagctggtcacccacgccacattctcacactgctccatccgctccaacgcagcatcaacccgccatagcatcgtccctgactgcgtgcctggctggggcttcccacgcagcaccgcattggacgttgtgcagcgcgagtcggctgtcaggcggtactggatgcattctggatctgcagcgcagtagtccgcacaggaagcgaaagaagtcggcgtcttgggtcccttgtaatcttctttgtcgtcgcctttgctcgcaaagttatcccagttgtctaggtggtctgcgagggttgggcggatgaggttgcggaagatgtcgctgtatgtaagaacgcttgagtttgactgggctttttgtcagtaacatattccagggagatggatataccgccaaaaatgggaaaagaaagcaactcacagtcgcaaaccactgctgctcgaattcccaaaaccgatccacatccgccggcgtcatatggtggaaagtaaaaggcgcaaaacaccaaggtatcttcgcataagcctcatgcaacatatcctgctcccaaaccgactgagtagtaacatgcggccaagaccaagtaagcctaatacccgcagcagcaagcgccctcccaagcacacaatcgcccgcccattcctggttcgtgatcgcatcccacgcatcaacactcattttatggaaatccgccacggtatgaatagccgcatgagacagcacaaaccccgacccaccatgcgcaaacaaagtcgacccaatctgcatctgattccccagatacagcttgtcttcggggttgaaatgcgccagccacgcgagcaggttcggccagatcgggtacgtgtctgcttcgaggaagacgaaccacttggcgtctggcttcgcgcgcagcgcggtgtggatcatcgggaggaatttccacttatccagcttccagcctgggttgtccatcatcccagctgggccgttggcgactttcgtatggtcttgggaggttagggctgtgtgtccgcctgtgcgggcgcggttgtatatagcgaagtcttggttgctttgtttgagggtgtcggagacgttgaggaagacgtcgtgggtgcgtgtaccggctatgtcttcttcgaagtctgagacgattatcttgtgcggcacgcagcggagagtcgttcttaagtgtacagggactttgttttgcgcttccgtgatgcccgtttttaccactaccagcactgagtccattcccgtgtctgtcgggcaggatgatggtacatggtgggtttcagtttttgagtcggtctcgttgtatgtatcaatcgttagcccggagacggatccgaccacgtcctgcgtggtctttgagccgaaatcggcgtggataaattggagtatcaagaggatgagaaccaccgggcccaggataagtacccagcgaccatatcggggcgggagagaaggcatgttcagagattgaaaactctagaggtggggaggaagagaatcggagaaagcggcttcagtgaatatggaaagatctattggtctccatatccagatgaagaccgaaatataaaatataaaagtcgatgggatcttcaggaggggccttgagttcttaagtgatgggcgcgtggggctgattcaagttcaaggtctatgtacatcagtgacatccaaaccagggctattatggcaccattattcatgagggttagttaattagtgtgagaccttgacccggataaaggatgtcaggtatgctgatcctgtcctgtcctggctctatcctcctgggttatgtcgtgcttcaatgtcctctcggatatctagggcttctttgtccgtgttacgtacgtcaccacatggggtgggtccgatgatctgaaacgtgaggtgttgatgtgatattgatcgataatagggaatggagtttcacattatgttaatatgttagagagggtgggagtaaaggtcaagggaagtttaagaccacttgttgcagggttacgatttgcctggtacacccatgcactatactggtacactagagtatgtacaactacatgtacaaggccagattagaatctgagacacctttaaatatcttggaaccaaaaaggatttttgcaatttttgttgtcatttcagagaacaattctctcgcttcacagcgcccggcactatgacaaggcccgagccggacatgccatgcacaatccttaaatttcgttatcgccagagaagtagtatcgccatacaaaaaccccgacctcgtgcaccaatcccaatgaaaaggaaacaaactgggtttattccatttatgcctcggtggtgacacggcccttggggttagtgaccttaacaccgagagccttggccttctcaataatctcgacacgcttgcgggaagaaacggcgtggccgatcctgtagaaattgttagcgtatgactcatataacacgacttagtcgctccaacaggcgcaggacgtactcagcagcgaaggtgcggttgtgcatgaggaggagctcaacgtccttggtgttgtggacgaggaaagccttgtggccggagggcatcatgtggcgggtcttcttgttggaaccgaaaccgatggagggcatggccatctggcccttgaaacggcgacggacgcagttatcaatacccttgggcttgcgccacgaggcgccaacgcgcatgaaccggtcagactggtgacggttgaagcggttcgtgcctaattgcggtcgatgtcagtcctccgattgtgaatgtgagaaatccgtgctcttttcagcctccacgactctgcggataatgtcgcccttcgatccaagacaaatgttgattttttcccagtgatcctccaatgctcttcgtttggtgcatcttgctgagcttgcttgtttcattttgttgacgatcgaagggcgatggtatccagggcatgggtacgaaaaggaatggaacaggtgatcgggaacatacgcttcttcacgatagggatgtgctgcttagcggcgaccatctggaatcaaaattagtgactgaatcgaatatcatgcgcatttggtgactgaccttgtcggtattgttgggtctcgccgggcgttcgagagttgtcgggttcggagttcaatctcgaaaacttctctctcaggttctcccgcagcagagtgggagacccacactagtgcgctttgggcgaactaagcgaaagcagaccacttatgtcagcctagggctggtccagccctagccctactattcctctttgggcgatatctggggatgttctaggtatacatgggtctctcattatgctgcacgttcatcttggggattctatattgttcatttatatgtcatattctggactgatttctccagtatgtaactatcactgcaaatgcaactgaaccttctcgccatctttctcgccactccgcaacatctgctccaagatctcaagatccgccaatgcttcctcgggagactgtctgctgtcgggttttccattcacaattgagtctgcaaacgcagcaacctctggcaaaacacccctgccatcaaactccacatggtgcttctcgccattaactgtcacgtcatcgaagttcaaggtgacgacacctttctcgcaagcaaactcgaaaatctgatcattaaatgacgatccccacgacaaagagataacacccgtagcaccagatttagtcttcgcgacggcatccactgtatcaacgggtggcaggaatggtttttgcagctgcgactgcgccgacagaatgctaagacgctccgtggggcctagaatcaggcgcagcgcagcagtcatgtgcacaccaccgtccaaaaggaatccaccctggtattcaggggtcttgcgccaggcggtgtctagttcaatatagtcagtcgctataagaccattcatgtagttcactgggactggacgtacggaagtacttgttctctttgtccatcaggctgtgaacgttgacgcggaaattctggactttgcccagtttttgaacttgctctgctgcgaagaggaactttgtgatataacggaagttctcagcgacggcccagaagaccttactggtgtcgatattactcttgtaccagttcaaaagttcttgggcagtggcgacatccttagcgataggcttctcggacaagacatgcttaccggcgagcagtgctttccgaataaactccggctgaaccaggatgggaagcctgtcggaattgagagttagtgttttactctgtttgagttgaatctagagaaatcggggtgatcccgtacgcaataatcacagcgccgatatctgaacgagccagtagatcggtgtaggacttgccggagcctgagtcttcggagtagagatcgacttcagacgtgccgctagcgaggtcctgggctgacttcaaggttcgagaatagatagccttgagttggaaatttgagacagcttggacggcgggctgtttattagttagttcagtatattacatagaatatgggatcattggagagtttgtcatactagatgctgctctttcgcaaagagacctgctgaatgttagccaatacaaacaacgtagagtatacaaaaatatgtaccactgccaatgattgccacgccgatagacatgattaatagtaataagtgtgatagaatcgagaagaaagatgtttcgttgcagtacttcggtgctattaaaggaagtccaacagtggggaacaacactttaaactgcgggaaggtccaaccttgacgcacgtcatttggtcggctgcattacctatttaagtagtacatcataggtgacatgcatgtataccgtctgatatatcaagttacaattcaagtcaaattaaaaaaaacacattcataaccagacaaaaagtcaatatgaactgtacactccataaccccggttgcgcccaatatcaaaggggaatccaaatccccaaatgcgaccaaatagacgccaaatcatgtccatcgtcgaataatccaatcgtaccggtcataagaagacaaaaaatccaacacatcaactcaaaaccttccaacgttccaatgttccaatgttgaaacccgtcattgattaaccaatgccctcaatcgctccacgcgcgccacagcattctccaacctctccaaccgaccgcgcttctccacatccctcttttccagcacagcaaccctctcctcaagcttcgcgcgagccttgcgctcctctgcgaccatctcatttgcctgactgaaaagctgcaccgtcaactcctctagctcagtactcgccagcgagagttgcgactcggcagcctcgcgcagtttctgctcgcgcgcaagcgcatcctgcagctcggaggtgtgctcgctgttcgcgggggacatgtgtaggagtggtgttcccagcgcggtcggggtacttgggagggggccgctggatactgctggtgcgggggttgcgctgccacgtcggtaggggaggaaggaggctaggtttgtgaggcggctgtggtatgtttgtcgttgggattgagattctgaggatgttgggcgctgtggtgatgaatggtcggctcgggaggggggtcttcccagtgaagagctgctgcgcggggtgtggtaggctccttggggctgggaggcgcggagacggcggagttcgtcttcgtactcgctaagtttggaggctgtttgcgatcgggttagcggggattcttgtttttaagggttggattggaagaaggggaagggggggaaagtattgtcttctctgtagacgcgtgatcgcattcatgctacacttgtgtgtatgtagtctgtagagatccttcacaggcttacctgcagccaaagcgcgcgctgtcaacgtatgcacttgcccctccaactcctggattctatcgtgggcgccagaaccatcttggggaaagccttcaccccaacacatgggacatttattttctgatataacgacacccttcatggccggtatgacaagcgtggtgacggatgttgttgacatggtatgggttttaccccgggattgacagggtttaatgttttgaactaggcgtactagggttgcaacggtgggttgacggggtttaagaagaacccaagtgatagaaagggaaaaggaaaaagaatttaaaaggctgaaaatcatacgaatccctggcccttcgaaggggtttcaattaaatccatgccggccactccatttcttggccaatcgcatctccttggttcctggatgatctcataagatgttagaatgaatgaatttgactggagactcaactatagtccaactatattcaactgtattcacactatttcgaaaacagacacagttcactatatactatagtgacatctcacaccctcggtcgttgtattaatatgccacgttcttcaaactgttcgagactagtggatcctatttatacccttgcgtccaatagtccaagtggaaatctattttccatgctattactgctaaaattagacataagagacatagagtctcagtataagcatcgtggaaaaggtctgttcttctcgaagtatcgtagatatgtatttatagcctaaagaattctacaaaaacaactttcggtgaacatttcattctatgctaagcggaaattcaattcaaaaaggttagtacgcagaaatggagcaaggaccatcgagacaactctgccatgcaaagaccccaaagaattgaattagcagtcacagaaagaaaagcaggaacaggaattgatttcgtcaacgttgtgctcatgagaggggtgctcataatgactattctcgcagagtcgtcttattcacatggccgagaacggagaaagaagaagagtgtcaacactccgacttccccgtaggtcccaatggcagacaggaacgagaaagaaacaggaccacccgtggtcaatcaaacggaagagaggagaaagttgagagaacaagaaaacagggcaaggaaaaaaaaataaaatggaacatgtagtattcgtttcgcatcggctgtaatggtcatgggcagatcactttgagtcacgcatgggaataatagctagatagcgaacaagacataaaatgaaacttttcggattgccagatcatcaaagcgaggactagatgtatatcggaaaatctagcccacgaaaaaggagaagagatcatgaaaccaaagggcaaaagagacgaagtggaaaggagaataaagctcaatcagaaaaagcaatctacgtccggcactgagaaatggcggaagcaggtggtaattatgagtgacaaacctatcccgatgcaccgctcaaggtaactagaccgagcagcgcaccaagaccggaatgaacctcgtccagaattaacccacctggcgttccggtaaatccaaggctcagggcaaatcggtcgttgcttcggggtatcgatacgtttatgcgaatcctcgaccagtctgtccacggcggttgttgcgcttgttaacactgaccgtgctccatccctcgtcgtcaccgccagcagcaggagcagcaccagcctcaggggccggggctctccagccgttagcagacgccttcttggcttcgacaggagcggcaggcgtctcctcggtctccttttcggtggccacctcttcgccatcctcaccggcccgttggaggatctcaaagttgccacctcccttgggggtctcaatggcatccttgccgttgtgctccacggcaggggctgcctccttagcctgcttttgcttctcagcaaacttttcggccttctcggccttagccttatcggcagcttcctgcttttggcggagggcaagctggcgtctctcctccacctggcgctcacgggtagcggtgtcaatggggcgagcggcaccgaaggggctagccttagagtcgctgctggctgaggtaggagtgggggcggggttatctgagatggtgcgcttcgtcaggttcaacttggggcggctagcaggggcagcaggagcggcaggcgtagcagagggggaggcgggggtgataggctctttgggggtttcgtcggggcgcattctggcgcgccactggttgtccatatcggcagcagtaggtgtgggctcggggcgaacgtgctcggggcggggagggcgcgagccctcgtcctgggaacgtccctcaccccatgcggcctcggttctccggaagctggaaccaggtccgtcgttgctgtgctctcggccaccctcgcggggcgggccaccggcagagggcgaaaggggtcccttgcgctcccagttgttgaagtcacggggctttccgtcggactcaaagttgctgcggcggccaccgcggtcgctacccgcatcggagccggcatccataccacgtccgaagctggagcgctcaggcgcacgtcgctggggaaggtcggggaggggaccacgtcgggaccagtcaagatccttgccctccaggcgagattccttggctagataatctgtcagtcgaaatcattacaaaacaccaaccttcggtacttacgaggctccgcaacactggtacggatggaacgtccctggaaagacgagccagagagatccagagccttctgcagaccctcgacggtctcgaactcgacatatccgaaacccttaggggcctttgtcaacttgtcttccacgagacgaacgttcgtcacgccacatgcagagaaaaactcggagatatcggcgtcagttgaatcgaaggaaaggttgccaacgtggcaagtgtaggggggctgtgtggggagatcaagaggctcccggacggcatatcctccacgctcgcgctctaatcattcaatctgtcagaacatggtctgtgtgtctggcgcggggaatcataccaaagccgccagagccggaggcggagccgtatcccaaatcacccgcggggcgacggttgaaggtggaagtcaatggctgggctgtccatagtgtaagcaagggtttcgatcaacgataagcatgttaggtgcacactacatactggctataaattttgttagtacaatttcgccgtttccatagtggggaaatctggaacttacaaggaaggggcatatcctccatctcatcagcccaagagccaaggcctattagccgtcagtaatcacctcaatcatccaaattttccagcatacgcactttcatcggccaagaaggtgctcatagacatcttctgggctttatttttgggagctagtaattcatcatgttagcaatcgcccatgaatattttcgggggacggatgtcctggaggacatggaaggtctggaacgaacccatgattgcggttttaagttgagggaaacgcgccgggatttgtgcgcgcttctcggagagtagggtgagaaagaagaaaaggtcaaacgatcagagatacctggtgaaaagaccaagaatcaaattttgagtgaagtagttgagtgaggttcaatatctgcaaacccacagtggaaaagttggtagaggggaagtcggctgcggcatggaagtggacgggttactaaaattttagtggtgacgctagcccaatcagaggcgagatcggtctataccagaactgcgaccatcgtcgaaatcgtttgtattttccctggaattgacgaatattgtgagggtaataggctatttgtgcctttgttcgcttgaaataaggcgggaagcgagaaaatgcgagttcttaccttgtctgtatacgatggtgcatttcttatactcggctaaaaatatatcatagaatatactgccaaaaaaaaaaagaatacgaggacaatttcattccggttgtaactttattggctataattttgtcattccaagaggagtcggctgcagtagcctccgttacttgtatgaatcgacagtatgacaagtccgatttatagatcgttccgcattagcgcttgatactatttcatatacttcgcctgagcctctggcatggaactattatatatatagtattgctgtaggccttttgggtagggctcaggtataacgaattttagtggcgtacctacatgtatgtacaacatatattttgagtactggaggctctgatcaggcgctgatcaacgaatatgtgccctcctcaggctgctagcaagatgcccagagatattgtattcccgaagaatatgcaactagcagtggacgtcattcctataccgcatcagcctgatttctaaatatttgtataacaagatgcaataacatcgcaaagctagcttgaatggatattcgagctttatttcaagccttttgacattgtgatagacagttcttggagattgcgtctcgtaccaaagtggaggtttggcttgtgagccagtaggaatcaatcgcaaccatatgaggggaaataaagatcgcggggctggcggtcttgcaggcgatcatctactgggcatgtgcaatgcggggatactatatctgggcctcgttcaccatttatctccaacatgattaaacaaagccagtcgccatagcatgaatataaaatatagaccaaaatctttcgaatattattgtaccaattctgcttatgccctaattcgtccatccaaggccgtatgataacattacataatcaggtacatcaaccgggcacgtgaccatattccttctgacttggattactgcttcgatgagagcttcgatgattgttacttaccattccacgagctttgaactcatgcatctctcgggttaaaaaataatgggtgaccaaatcaaagatatgcaggattttcagtccaacgctctcatgtctgcagccaaggtcggagccctcagcggttagtatctgcccttcgtaagattgtttggatacagacacaacggggttttcaaagatgaagtgctgattttccaaccaggaaccgctggcctgatctatggagcagccgctggagttatcagatcccctaatcccatgattcattcattgtcatgtggcatccactggtttgcgtgcggctcagccttttggtgtatgtggggacactctatgtttatatcgctgatgtctaaccttaatcttgggacagggctacggagcaacatcattaaacatcactaccaagataaagcatcgcttcaggagcgcacgtacacgagtgctttatgcggtggcattgccggcggaagtgtaacgaagttgatgggtaccgtatcccgcaccaaaagcacatattctggcatcacgtctaactaaatcatacaggaggccggctggttccgggggctatcattttctcattactcgggtactgcggccagagcgtcttcaaccgagtagacgcgtggcaaatggaaaatgcacacaagacatcgaaacctttgatgcagcgaatggcggaatctaaatggattccactccgcacactctctgaccaagaatacagggggatgttgagggaaaagctccttagcgtcgaggctgagattgctcttcttgacgataaaatccaggaactggagcagtctcgaccggcctctgctccaagccccaagcaaccctgaaaatagggccatgtgaaaataaggcaaatgcgaattgttgtacaatacaaggggagagagagacaaagaagaggacagagtcgagcataatgaatatagagcgggcctggagtccccgagggctgataaaaggatctcccctgaattcttgggtcgcgtgtcgatcaatctgaacaaacaactatataggaacattgtaggagtctatcggaatataaaatgcttgatagtatatagtctatgaaaagaaataacaacagagccattaatgtaaaaaagaagccaagttatgagatatgacagagataacttagcgtaccgctctttttggccagttcctccgatctgtccggtagcccactctcattctcccttaccctttagtttccccccggcatgattcgcctacactcattttattcgaatcagcctgcagtgctcatcctactgagactttgatgggcaaggtcgctgctgttctggagtctggagtcactgattccaaccagacagacagtacggagtagaaattcgggggacctaacaacagtgccattgaactccgacataacttcaatgtgcgagtcgacactgcctgtctgagatcagcccgctgctgatcgcaaaccgcgatgaccctctttaacccgacctcgattctcgtgggattcctcctcctttacctctcgtcctttttcatcttcgctatcgtccggatcgcgacgggaatctctatccaacggatcggctacttttcgctgcgccgaattgcatacaccccgaaggaaggaatacacattgaaatccgtggcctcggattgttgttacaccccccgtcatttgcccagccaacatggatcagcattcggttgacagaactgaaggtgaccgtggactcgacgactctgggccaaggaaaacgcgacgcaccgcgtcaaccatccgaagaccacgccgcccccgaacctggcggcagaagcaaaacatggaggacgttaacacgaatcaaggaacgtgtcaagcggctacaccggcagatccattggttggctctcgtggacctgactgctatcgacacaaccgtccactttgtcaacgctggccaaatccaggtgggatcgctttctctttcagtcgacacgcggaggaagatggtggaacggggcaagctatttcgtcgcaagaaggatatgtcgcaagaccaacgcccagccgagtggattatgaatgccaaaaatgttttactcaatgtcgacggccgggagccaaccgagatattggataatgttggtgtgaatctccatggacttcttcacaaggatttggacggactgagagacgcctcggtggcccttaaaattgggcgtttgcatattccatatgacgatctccgcacgctattgcagcgcatcaaaccggtcaagaaatctgcacaggggtcaaatacggagaccgatgacgagatatcatttgccgatttcgtggacgaactcgacaagcctggaagcagagacaatgccattatacagacagtggcggactcaaaggggtttgcaagctcattacttcgtggtgtacaggagatacagattgctttgagcttcttccgtgtctcaaagggtatccaggctctgtctgcaggacaaacccccgtatatctcaatgtggtatcgcatgagcttggaattgatcttcatcggatggaccaaaggagcccagagcatcgcatgtatttccagcggaatgatgttgcccatcaggctcttcttgctgctatctctctttccgtcagcttaggcgacgaatcgggcgagaccgataacattctatacatccccatggctacgacaaccatcaaaaccacactgccttcgaagacggtgagcaccttcgatgatgggaatgctgaagagcgaaacacaaatgtcctgttcgcaaatttggtcgtgacatcaccctcggttgatctccaaccgcaacatgtttcgaggctgcttaaactagcacaaaatcgagcttcttctcctcgggcgaagaagcgagataatcatcgattgatttctcgactactcccgaaggcaagcatcaatatttctgttcacgaacctgtggtccggtttgttctccccatcgagaaagagtctggtactcccgatgattacaacctccttatttcctcgatctcctctatttcactcgatatcgagtcctctcattcatctgaaggcggtgcccactattccctatcgtcaatttaccgggtcgcctcccacaaattctattaccagactccagcaggcaacaaacacaatttgctcacaaacgagaatctggagctgaaggcccatttgaacgccactccagaggtctgtgtaatcgcctcaggaagtcttaacgagtgttcagtccacatgattgatggggatgtaaaccgtggaatccgcgaagtcttgcagcaattcatcacccagatgcaatcacagaagcgggtaccaataccgacaaatgaaaaaaaggcaagcgtgttgagacgagtgccaccatggctactccaatttcagttcgaagccacagggtccagtgtggaagtcgctggtgtggacagcaccgtttctgatatatctcgtggtgtatctctgcaactacaatcgtggacagcggaatacaaagctcaaaaaacggagacaaatgtcggaagcattgctaggcgacgcactccgagccattccaccattggcgatgaatcgccctttcgatttcccccaacctcgcctcctaaggctactcacacacaacgcggcgcttcagatggccggcgactggctttccacgcgcgtggtttcgatggctttgtcattgaatcagaggattatctggaacccgagccattcttctctttgcctcgattcgagattgcgctgagcacccactgtgatcgcctcggaccgctcctgcatgtcacatccgtgttcaagggcatataccttcaatactcactgtaccggttctactgcctcggcgttgccgtttccgtgatccaagacgtgctcacacccttaccgccaaagcactcagaggctgccgaaaacaaacccagggcgcctgcgagtgtctcgctaccgccgcctccggcatacaaatggtctccaaaaaaggagcttgtcacatacgacatgaaggcaacagttgtgcagctcaaggcaaacctgccgaacgatcctcaaataatgattcagatctacggacttgccggtgcttctcaacgtctttctactccttatgttaaagccaaccttgtccgcttccatgcagaggcacctaagctcaagggtgtttgggcaagaatcggaagtatgaacaacgtcaggctggatttccgaaagatgaagatgaaacatggcaacactttggtggaagaaaaatctatcgacatatggacagacttcatccgaattggtgtacctcatcatatggtgatgcaccgcatttttgataaccttatcaacacttccaaggctttgaaacagctgcatcatcgcttcaagaatggttgcagagatttcggctccttgagagaaccagaaggcccgaagaaggtgcctaggatatctattcgcagcaaagcgttgctcttcgagttggaggacgatggctttgagtggaaactgggctgcatctatcgagttggcctggttgaacagattcagcggctggcccgggaagacgccttccagttgaaatctcacaaagtcatggaatctgaccagcggcgtgcctcatctcggtcacgagccaagtcgagccatcggacaatgcgcagcgagcgaactagcctagatacaaggcgaagcaggagtgccgatgaacgcccgagatctagcgcccaagaacgcgggagaggtcggaaataccgctatgataccgaaggcgccacctgtctctcatcggagcaaaagatctctgtgcattctgcctggggccgacttcaacagtacaatgctcaagtctggaaagagaagatcgatgcagctctcatgttccagggcacttctatcaaacaagtccgaaatctcttctctggtgcagatgaacctcctccggatgtgaaagagaccgaaaccattcttgccattccgaacagaccgggtctgatgtcggctctgatcagtgatgttcaccttgttattgacaagccttcattcgctatcgatgagttccccagttacttgaaccgaatcggaaaggggatgcctatgtctatgaaatacggcctgctcatcccaatgagctttaacctggaaatgggtgaagcacgcgtcaacttgcgagattatcccctagatctattgcacatcccagccctgcgcccagggcagtccccaagacttcccagctggtctttgcggacgaactttgtcattgcagaagaatggcgtgaccatgaatccgcaagacaggttgaagtggaactcgttcctgcatctgaagggtccgacggatccccccgcgatgcgttcaagattcaggtgtggcgttctgttacaccagtcaagacctattcggaccctgtcatcgagataaacacaagtttgccgactagcatttcatggggtgtctcctatcagcctgttattcaagatatgatgaagatcattgagggtttcacgaaacctgaaattgatccctcggagcgggtgggcttctgggacaagatccgactcagctttcactcccggatcaaggttctctggagggaagatggcgatgtacatctgcgacttaagggctctcgtgatccgtatgtggtgaccggctttggaagcggcttcgtcatgtgctggcgtagagatgtccaattggatgtgcacaccagtgacaatcccatggaattcatgactgtcacgagcggcgaatatgtgctcgctattcccgactacagtgccgaagcacgttgggcaaacgaagctaccactgaggaggttgataacagttctgcatccagcgagcagaagaatgctgcccaattcaaaaaggttattatgaagctctctggcgatgtcaagtgggcagcaggtctcgtcttcgagcgggatagtgagaatgatgagaggtccttctccttcaaaccacattatgaggtcattcttaagaaccccagattcgtcaaaccatccgagcagatcaattacgatgcctatcgtggcttccggagtgaccatattcacctttctgtctcgattattgcaccgcagaatagagactgggctgtcgacaatgtgcaaccgtcttcaagctacaacacaatccatctctcaccgcgattcttcacccacttcttcaattggtggtctcttttctcgggcgtgatgtcgcttcctgttcgccaaggatcgctctggccaggagtcacaaagaccgccaagaagttcaatcgtcatttggcgactgtcaaatacaagattcttcttgcaccccttttcgtggcccatatgtacaagcacaaggatcgcgaagattatgaagagagagctgttgtggccacgggcttgaaagttcgccttgattgcttgaaacttgatatccatcaacgtcgcgagcaaatcaaaacacaagccgggggccgttcaaaacagaccaggacaaccgcgatgcgtattaatcaagcccaaattgatatgcaatctgcagacttccgcgccgtgtccgccagcatcgaaggcacaacaccggaagacgttgagcgtaacaaagacgatatcctctcttccttccaacagcctgttccatcagttgacttgtctcgtttcacaatccctgatcacaatttggactgggtcgacatggatgatttcgtggagccggactggatccttccacaggagtcgaacccccgtacccagatcttacctttggccttcaccccgcgattcacctacttccgcaacacggatcactgcgacatcggacccgacgaaacgggctacagtccatttggggacgaaccgacccacgagtgtgtcatgtctgaaaccaacgatcctcgccgtgttcagattgagttggtcaaagaccgccttgcaacagtcgaggcacagattcgcaattatgaaagcacaattggggaaatcgaaatcaagcttatgaaagaagtagacaataatacagaactgaaagccgagcatgagttattccttcgccagtctgagtctctagcgagacgacgcaagttcttgaccacaactctcaatcgtcttgagagacatatcacacgcgacgagcggactccatatggcgacacacttggcaaaaacgttgcacccagcactgcttctttccgaacaggacgaacaggtacaaccgatggccgttcttcagccctggatggaatttactcgtcggccaacgatgagttctccagcgatttcgacaatcgtttcatgatccacaacatgcagctcaaatggaacaactcgctccgcaacatcgtattgcggtatagtcaccaagtgagccagcggcgtggatttgtctactacatgtctcgccgcgctgtcaaatttatccttgatatcgtggaagaacaggacaagagcgatcgcaagcagcctaaaatgaccaagacacaaacccgaagttcgagcgtcgatgaggatgaggaggaggttggagatcgcattgaacagttgctgaatgatgctaagcgctacgtgaatgtcgaagagaacgatccaccagactcgaacaaccaatcaactccgaacaccccatcctctgccaattcggacagttcgagtgagaatatcgtgccggaattcactccccagaacacttatcacttgcgtctcattgcacctcaaatacagcttcttagtgaaaagaaccagaagtcggtcttgcttgttgccgctaaaggcatggaactcaaggtcgtgtcaatcatggacaaagggcgtgtttcggatgatgtcagcggcttgatacaacgccgtttctccctcgaaatggacggtgcccagtttttcgttgcaacacagaagaaattgatgacaaacttgcaattctatgctggcaataagtacgggaatgcgcctggatcagcgtggccaccgtggttgactttggaagccatgtttgatttcgagttgaatccatttggattctctcgtattgtgcaaaagacttctgccaccctgcgttacgacaagttcaacaatcttcgcctcaagtataacgaagaggtgaacaagaatcaggaaggacctcaacctgacgaccaagaagaccgcatagactcgattagtgtggacttccctcatttccgcgcgatttgtgattctgcagagtactattccatgtacattattgtcctggacctcatgctctacagcgaaccactcgaaaaggtccgaaatgagcgcctagagaggatcatgctcacttccgacttcagtgaccttagtggcgccccggaaatggtgttcaagcttcaagcacgcattcgccagttggaagaaatcaaagagtactttcagatcaacgctaagttccttgacaaacagggctgggaggatcggctggccctcgaacgcgacttgtctctatgcgaggatgaacttttcttcatgatgaaggcaatcacaacttcccaacggcgaatggaaccgagttcgtccagggacgccggtgtccatggcttactgcgttggagcatatcggcgagcgaggtcgtgtggcacctgatgaaggaggcttctgagcccttgattgagttccaattgcgcaatgcttcatatgagcgaaccgacaatactgatggctcgaaccataacctggtatccatcgaacgactagtcgggttgaacttacttccagacgctatctaccctcaaatcatcgcgccttacctcgacggcggacgcaccctcgatgacttcatgttgcgcatcaaatggcacatgctggaggccgttgccggtatccctgtgcttgacaactttgaagtttcattgttcccgctgaagattcagctcgaacgcgagctgggccagaaagtcttcgaatacgtcttccccaacgtgggttctagcgcctttgaggctggtggtttctcgcctttcatgatcaagaacatgaagccacttgaagcttcagatggggaagacgatgacgaaggccccaacggcgaaggccccaacggcgcaccactgacacgctcaacgagtatcgatggtgatagctcgtctatggacagtctcgccatctctaagggaccgggctccatcgaactgcgcctccagccgacactgtcacttttagatgagaccaagccgccgcgtcatcgctcaggccatctgaagggtctgatgatgacacctatccaccaagatagtaatcgactgggtgtctcggagaccgcgcgcaaaacgggccgtccctctacaactggtggtctccgcaagaagaagtctgctgatagtctgcgcatgttgactaaacatcccaccgaaagatccatgtctagccacagtgctagcgaagacagtcgcaagaagttcggaataggtaaagggaccaacaagggcggcaaatccaaagagcaaaccgatgacctgacccaaatgatctcccgcgcctccaacttcatgactctcgcacatgtgaaggtgaatgacgtagttctttgtctgagctacaagggcagaggcgagcacaatctagaggatctccacgatttcgtcttccgccttccagttctcgagtatagtaacaagacatggtcgaacctggatcttgccttgcgcctcaagaaagacgtgattaaagccctcatctcgcacgcgcccgccattcttggcaacaagttctcccaccaccgaccttcgaagcagcaacagaagcgtttccgtgagcttgcatcctcgtctcaactcctgccagacacattcagcttgatgaaacagaacaatgatcaagcccatagtctggccagctacgactctaatagcgattactcggagtcccgctcgcgcagatccatgcagtcgaatgcctcgccattggctaggacgacctcgttgaattcagatccccacggcacagattattcagatcccaccatccatgactcgcggtccactagtgatgtggatgtggattctcgctgggaggttcgtgttctttcgtctcaccgtgtcaccgtgaatatccccgaatgctaatacagaatgtttaggcgtcgcgtcgatttgtcaatgcccctccacccgaaaggccgatgacatccggtaacaccgtgactacgatacgatctggcaagaatgatcaggatgataggtatgaatcccacccccgagtccgtttatcgccgtggcgaagaaaccgactgactcgtctagtcacatcaaaacaattcgcaacatcggccggaagctgacattccggaaatgatcgctttgcttcatctactatatcccttcttttctcttttcgttcctatttgacctaatacctctacacccttttaaaatcctgtgatcctttgtacactaccatcgctttattcccaccagacccctcgtgtctcctagataccctctacctgcatcgggccgtacataggtgactgtacataacatatttcctctgccgggtggggctttcctatcttagctgccgccgcttttacgagggctcagatacaccacggggtaaagccgtgaggttctgtgttccctaacgaatgttagggcctgatatatagaaccgctgaaatcaaatagacgttctgtttgtccttacgatcttttggcctgactagttagttatctagttatgtcacgtaatatagcttagttgttaaagttatagactaggtactcggcttaccgagaacggtagtctgtaggtaactttgtgttcaaccgaagacacaatatatagagctgctatcgaatcaaattgtaaggcaaattatagttttattacaataacccagccattgttaccaaggaatacagttgaagtagcgcgttgcataagcttccagtgtactgccatgtatttggtggcaagtgattctgagcgcaccccactcctgaggctccagatattcacaaatatgagacaatatctctggaggcaggtttgtgatagacattttgaatgaatagtcacgtgaacggttagggatggggttggaaaggggtttcggctcagaacattggaatcatatgagtttaagtaatcaaaggttagctctaactaaaaaaaaaccttaagagaccctccagggctacaacttcgcttatagtgacgtgagttcaccgtgtttctaatactaaagaaaggagaactgatttctgcgctgatacattactctgtatccaacgtattgtgacggttgccagtctactaaagatcagttgtgtcaagacctcagtactaagaaggctgatgcctgaagtatgacaccctgttatggtgcgtgggtcatgtgtcccacaacctttatattatcctcgcatgctgcttctttggagaagcagctattagttccactatgccactgcgtatattaggtgcgaggtcactgtacaacggcggatcctccagctctaggtgccagccatctggctcttccaccttgatcccctttgactcatacccaggtaagacctttggcgaggtctcaacagttggcaatggccagactgtggcgtcgtttgggtcgactctcatgatcaaggctagcgcgaaccataccctctcactgaggggtgcggttccatggtctagagacctcggggcgtctcacgtatgattacgtatctgctacctccagcaagatcgagaacgaggtttatcgtcatcggccagaatatcaatggcttctatggtaagtactggacgaagataaaacaaaaaacccgccgagtgaaggggtatttaccaatagtgaacatcaccctaataaggagaaagtaggacttacccatcaataattacatgagacaacctcatgctgctaccttcgacgttatagaaaaaatatgatcggaggatatctagcaacggcatctcccgaggccgagagaccctggttgatccttcagcggcaagtggatggagccttgtctcagaatatcgcgcatattttaccacaaaagtgaggagaaggatggcccccatcagctagagaccctgttccgtctcgggtgcaaacagaccctggtcaggaagactcatatggcccccattttcagaaaattggacctggcccctaaaattcaatccaggatgcttgttccaggagagaatagctgggtcaggccgccgatgattgcaagcattgctacccataggcatgtagctagactaactttaaattagatgattataagaaggatcccctctccccgtcgatatttttgaatctcacagcattttccctcagtattctactggaaatactagatgtaattcttcttacacgctcttttacttattcatgtttatcaactgaccgctgtagctggaatcagtaatcgtcaataggaacttctacctcggttgctctttttgacttgctaccaggtattttcatggaatttatactacaaaggcttggaagtatatatgctgagtccacaatatagataatcaagtcgcctctagactctcaaaactacctataaaatccatctacccctccctcgtgcacttcttgtgcttcttgaccaccatggttgaaggtctcacccggtaccagatcacgcccccgagcgacgccattgtcgtccccgacagacaatccatgaacgatctggtcaagctgaatccggaaacaattcttcacgccgagaatggaggctattatctcaagaacatggacgaagaggtcgttgccatcgctggggatgacctatgcacagagttcgacgccgtgtttgccagtattgatgctgatgtcgtcggtgacggctctagatctggggatgagggatctggatctctgggcggggcaaatgttacgaagaggaatgaggatctcgcgttacccgaactgtatgcaaaatttctgcagccacccccgttgcttccactctgccacctgtctgagctactcgtattgccatatatgctcctcaagcagccggaaagtttgtgtctagagtgtagtgttatttgagacaatattagagagcctgtacggaggtctgaaagggtgtggcacgggcagtgaggctggaagaggaacacgagtgagaatatagcatctgccacatctatcaatatcctattattcgctctgcagataattgtcttttgtcttcatagatgaaatgagtattgtttgccaatttcaggtactctgatcaactcatactatcgtattccactatattctttactaatttaatgagtgctataccttgaataggtcaagatatagttaaatttagttcctcttttgattctttcagtaccttcattttaagcttgatactcgtttcctgctgggacaggtggctatgatagcgcttccttgtacatgtacacactagttagtggcttccccttacccatgatatagatagattttgtttagcacctcttcatttatgaatatgtaccaaggctgacgtcgtagggtaatttaatctctgaatatctccactggtcggtaatggctttacagcgggggaaattagttgcccagtctagtctctttcatacactttgtagtgtttatacgacgaagtatgtcttgcgtgaagttaatagtagaggagggtataatgtacgatccctaggactttagtgggaagtctagatgtatataaaataataaacaatatcttagggtcttaattctcccagagaataaacagagggtatctatatacaacatcattagcctgcgcagcaaaacaaaatccaaagaatgtcaagtctataagccctctccccaatgcatttgcatgagcaagcaaaaagaccaaaatgagaaatcttcattggaacaaacaaattcatcagtcatacatattacacggataatttctccgtagatggttcggcattggaagaggagccaagagttgctccatcataagttccatcggtgacgtgagacgcctcattaggggaatttctggaggcatcgttagagacatcatgggctccattggagactccggggacatcatcggatattttctccacgccttcggatggtgccgagggatggtggtgatgattatcacgagtccagggccagacattagcctggacggactcgaagcgggtacgtgcagtgggcgcgctgatatcgtcaacccaacggatgcctccttgtccacggttttcggcccacgcctgcttctcacgacgcaggtcactcttaacccagggaattgtgatcaaggtccacacaatagcccaggcaaacggaagggaccagcccaactttacgtaaggttagtctgattgtaatttgagattaaaagaattccggcttaccgtaaacgcaacgttttcctggacagtgaaaacaatggcggtaatggcggcagcgcagatgatggaccctccactccagaaacagttcatttcaaagagcatacggcgaaaataaggactcgataggtatcgaattcggagcgcatatcgatacatctgtccaccacctccgtcaactgctaccacgtcctcaataagcgcgtacaatgcagttggcataacagagcctttgggcgtggaagaaattcggaatggagccttgaagcccatcatacggaaaatgtcgagggaaaggtagacgatgccgaagtagaacatgacggttggtaggaccatggcgatgaggcgtactgtttaagcagtcagtatgaggcaattgcgtaagatattatgattggttggtctaaccatatggttcttcaggtaccgatccactgtgaacttgttagctcattgttcatgctgcttccatgatatatgctagacttacacgatcaattcgacggccagaatcaaccacacgatggtgaagttgatttggaagaaatccagctaacaagaggtatcagttaatggtccatgatcaatcccaggtcaaaacctacccatgatacgcgggagttcaggggccgggcgcgtgagcttttgcggaataaattatgaaggcggtagaagtattcgaagaccgagactcctccaagcgatgcggtaacgatcgagaagactgcacatcaaaattagcaacctggacgggcgtatttgttccaccgcgcaagacataccgatgttgggcgatagatcggtgaggtaccaaagacaccaatacagaatcaacggctgagccaaggtatcgatcacgaaaatagtccagaagaacgcaatggacttcttccttgtgtgcaacgagtacgggagcggagggggctcggagggtgttgggacggctccttcttccatcggggtggcgatagtggcggattaccgttgttgataggttcggggaaagcgcgataaaggtttgatgaagtattaagggggttattaggacatggtgcgaatgtgatgatgactccgaatgggtttccagagagaaataatccaagaaaatgaagtgaagaagaggcgaatatgtaaattgaacgcccaggaaattttggccggaaacaacggggccaggtacttccgttgccatactatttggctgggaggacaggtacctgacgtaagactccatgatgtcattcaaaacacagccctgatcaaaccacctgctaactatgtgggcatattttatgcatatatcccttggcgaattgattttgcctcttatttgtctggggcttgaggatactaatatcgaatatggcttatccaatagtcctctatggatatagtataaggcaaaccaaaggggaattaggacgacgtcaggtagttatgcaatagacatgaattcataggtatgagtcagcgaagactaaatatgcacaaatcggcagaaaacaaggaatcgagacctaaaaccgacctcgggaggcataacggataccgattccgacatggctgggcccgacctcgggagtttacgttggagcttgttcataactgccccagtcatacggagtactcggtacaaaggagatatctcgtatgttctacagcatactatggggtaaatacggagtagttatacatcattaattgttatacatcaattaatctactctacctataatggacaatgtactccgtaatcagcagagacctgaacattggttgcacgtaggatattcttctgcaatatattttagataagtcaaaggatatcatgaaatctctccaatagcagtgaatttattattgttcatataaaatagaccccggatcattcttgatgccttacaaacaaggcacccacattgagaaagataaggtcatgtgacatgacaatcgcactgcaaaatttggaagctcggcgttcgaatccccccccttcaaaaatttctacccttctttaattttccgacacccatcacctttctagtactgtttttacttccctctttctatccagaaaaaagacatgtagccatgcctggcgtacaacatcttatcgacttcgtgctgaacgaagtcgcgctctgcggtaatcaaggtgtgtatagtctcttcactgggacccacttttcatgcatatggattttcaatgtcaccggaattatgtgaaagcgccctagtatgggatatatgttgaactcctacttcactctcctctcgggactttcgcatgatggatttgagtttgcattcttgtggcgcggacccaatgccgatttacatcctacatctcaagccttgattggcgcttttattcttatatacacttcgatgaatcgaatgctaacagacatcaaggtgcaacattatctgatctactgcaagccattgatgatttccatacacaatctcaggatgtgatggaaaaccagaacattgaccatcgtttcaaagccaaagtctggtcctggctcacgactaacccagaggtgtctattggccagcacaatgaatggaaccatctcaccttaagtgaagccgagaagcttgactcgcgaacaagggagaaagatgatgccgatagcaattctttggagcccaaccaaaccgcagagaatccggatttaccaccgcttcgaatctttgtctccgaagagagagcctgggttgccatcactggccatccaccagatgagtccaaggtactgccccttgaatttgccttactgtcggtgattgcttcgcgcaagtcaaagggtattgtgcagccggacctggtgaggctcagtggccaggataaacggtctgttccgaagcgtaccgatgctttgcaaagaaaaggatacatcgacaagcgacctgttcaaacaaaaacggccagaaccagcctctgcacgctgcagcggttctaccgccacactattagcgatcaaacaaagtcagaaccgcaatcggagaacatgattgatttcgacagctttaacaccagcctgttcaacattctccgagagcacccgctgattgcacgcaatgatttgaaacgactcctcggctttgatgaccattggcgttggaaggtcttgtcccgtgccctccgcaagtgggagcggataggcgtggtacagcgtgtgagagccgaatcgcaatacgaaagaatgcatccttgtgtgaagcttttacgggatcccacagggcaagatctggaacttttccatgaattcaatttcgatgtcttgaacaagcatggggtgcgagccaaaggaactaaacctaccccggaccaagaagaccgagaattgcagctggggggccaaaccaaaagatcgcctagtctggaggacagtggggttgatatgatcaaagagcatgttggagatgctgtacgtatcgtaccgtcttggacgccggatcgtaacctcaacaaccaaatctttgacatcgttcaaggaacaggtacaacaggcatcacgaaccaggtaagtaccttactcgcgaaagtgaagatattcttagctgacaaaataatccagaccttaaacttgacttgctttgggtcctttttcaagagacccgctgaaagtatggtgcatcgcttggtcgacctatggcaagtggcccagccacttcatctccgccattacgccattgttcgagatatggcaatgaaaaagaccatcatgttttatgtccactattcgctaaacaacttcgcaaagctagttgaagctggccaggcatcatgggaggccgttgagattccagccaagaaagccaaatcgctaaagatccaggcacctccctttggtgctcttcctcagcttgatgagcatggattcctcaaaaaggaattcccaaagaatatgttgaaggatccaaattcaactctactcgacgggatcacggctgtcaaaccgcccaactatcttctttcttcgagcgatccttttgttgttcaacttccaaacggtcaatatggtacgattgccccttcctctccttggatttcataagagaaattaccgtgaatctaacattaagccgcagtgatccgcacacgaactgataaactcccccctggctccaagcaacagtatgagccccgtttccggcccaagggacgaccgaaaggcagattgaaccgcgcgactgtcgaaaagcgtgccagagaatccaaagccaaagaccccatagccatagagtctggagctggagaacccgacgctagccaatccgaacccagagaatctcaagccgtggaatcccaagttaagccggagccaagccagggttatagctgggaatatgtcgaagaatccccgcgagccaagagagccaagataaagcacgacagccttagagggttatcaaagaaagagaagtttgaagcacttggtatggatgagagttggactgaatacaacgctcttgtcatggaaaagcctgctcctggtgtgtatgtgactccccacggccgaagaagaccagccggcaaggcccgaggtcgcccgagacagagccgaattgcgatcttcaaatcgccacagctagcatcgatgccttggtttgtcaaggacgaagatgattcaagtgaagacgacaaggtacgggatgatgctactactactcgggcatccgagagccttgcccctgaagctgcacattcagtcatcaactccgaggggcctgcaatgacccccactccgacaacttcaaggcgagccaagagaactctgcccaatgagccagcggcctcaccgacaacatcctcgagttcccaagccaatgagcagagaaccgggagacctgccaaacgatctcgtcttcgcaaggcccaaaatgaaaacaacgaagaaccttcgaaggacgctaacgagatattgcccgaggttgtagttccagcactccaagagggttcaatcaaagcgagtacaccacgccatcgtgacaagagtgccagcgctcgtatactcgaggacgaacaagctggaactccctcaaagcgacgccgtgtggcatcctccgaccgcgcgactttacaatccccaacacctcgtccatctgatgtcccgacaccacgattgggctcagtggtcctccagaaattcaattttagcgccaatggcaccaaacctaccagaaagccacgtgttcggaacagaactaacatcagaaacatgctaattccagaggaggaagaatcgggatcctctaagcctttgattgggagaggcggatctatcagtgtccttcggagaaagctcatcatggaaattatggaaaaggctgatggtgtatatcctgcgggcactgcaatgtggtatccttttgtcactgcatggatgaagtttcatcccaaggaaaaaccagacatgcgaactatcaatactgcgtgcaagcaactgattgatgccggccagcttcggcagctaactttcagcggccgagacacgagaaaagtgatggtaacaaggacgttgttgttgaagcctgatatctcaccagacgatccgttggtgaaagagatgcagaaaaagattctggctactgatttccacgagtcgcgacccttcttttcggccaatgtcgagctggatccaaatttgacaagaaatagtggtcgaccacacggtgcacctccccgcacgcagagattctcattcccggtagaagaaggaacccatgttcacttacaacaaaagcctatttccattgtgaacttagaggcaagaaggaggagacaggcccagacgaatttcattaaacgtctggaagccaaagccaaagctgccaaggctgccgaagaagcggatgaactgcctgacctgcctggagttcagcgactcatgacactcgcacgccctcctcaattggaccttgattctcatccgcacacatcaattattcgtccatatatccgaacaggtacacgtggtcctggcaagcaccaaaagtctatcatacatcccaagcgggtgatgaaaccaatttccgccatcggagcgtatgccatgttgatgaatccggtgcaacagtttgacccggctagtggaactttctctacggggtcgtgctcggccagacgccgaagaaagccaatggcagcaaaacagccggttttgaacattgagaaatctgtcgacgagttatctagactggcttgcgacgaagcagactcggaaatccctagtgctgtcaaagcgaaaattccactgtcaacattcacccaaaagaccaaaaagatcctcaaatgggagcttcatcatccaaatctctttgaagcgaaccttgaaggccagcagtttatcaaccaaactgttcaagatgctttcaagccagcgccggtcacaggcggtatttgcttcgacatggatatacctcctccaaaacagcttcaagtgcctgaaatacctgaagtgcctcaagtggaaccagatttgccagcacggcgtagcgaggtccgtcgccagcgtcagtctctacctgaacctctgccccagcctcctataaaaactactccgataaccgagacacaaaaacggacacccaaaccaagaagaacacgggctcctcgggccccgcgtgctcctgttacagatcgccgtctggccaaacttgatgatactgcaacagccgacaaagaagcacagtcggcgaccaccaaacgcattcgccgacagcgatttgtgcgccctatatccgaggatctcaaacaaaagatagtgattgctcttgtcgtcgttcgtgtgcttgcaggcggagcggaatcaagagtgatcgattggcctcttgtgacaaaagctttcccagatcaagattcgtcttttatcgaagggcgagcgcgtcagatactcaacaagaatcgcttacagattacgaagatgcatcgtgatttccaggagtgcttccttgaggcttatgaaaaggacgaagttccgcccattgactattccgacttggacagctatgactggcctgccctaattgaatgggcaagcactaggctcgatgtttctccgtcggaacgggctccggacctcccagcaacacggcaacaattcgacagtgttttcgaactacgcgaggatgctattacggcaggcgacgaactgtatcaggctgtgcatggtgtcactataaaccacaagcgcaacctaatggcgcgcaatccattcgctgtacccgtggatggtgagacacgcgcccagccggtttcacgaaaagttggtacagcacaacttgaggctgcgaagacatgggttcgtgcaaatatcgtcaccgcagaagagacctaccgacccaatgagtcgagcgatattctgcagcgctttggtgatcgacttgtcaccactgcgacgcaggcactactcaatgaacgtgtcatcagctcaacaacccgtggccgcatcactccgggtcgcaactatgatatctcggaatatttcctgcagacactgagccgcaagcgtgccgtcgaaagcagccagctgcgccgtgccgctcatttcaagtcaaagatgctagatcttcaattccgaactaccggtgcatccgacgtggagtacaccgcagaagatggcgatatcctcgcattgatcaatctctacgcttcgggtgctattcaactacgaccccgcgatgcccctcgcgccaagttcggcctcaccgatggcggctatgaaacgcgccaggtggacaagaaacgattccgtttccctgtcgagattactcccaccgcaacataccgctacggcaaccccgtccatggcaaggctgcagccgcgtaccttccacccgcgccttcaccatcaggcccggaaatgccacctaggaaccccctttggtacgacatcaatggagagttcatacatcgtctctgggatctggttattggccctgttctcgggtgcctggtgatgcggcctggcatcaaggctgccaacatttctaacatgatcaagcccaccatgggcgcatgggaaactgtgttgatgctgcaatggctcgaggaagttggcattgtcaagccagatggcgagggagacatggcttgctggagattacaggagtcttggtggatgattctatcttgattgcccatcctcgtgaactacttatcttgaatgtaacattatgtgaacaatgcttgctagccatacttctcaaaaagtcaagaaaaatacaaaagaacaaggatatgggtgcttgatttcaaaaactatctagaggtatattatagatcaactccggtaatgtaatcccaaacgcctaaatagccagcgaaagaaagtaatgctcaacatcaaccccatattcgtttacagatcgtcgacgttcgccactcggcgcaatatcaacaagataagagcaacgatcaccccaatgatagcccggtccagccagatactttcagatggagactccgtcgaagccaattgagacgagcttgtctgtgtatgcatagcagctgcagccggtgcttgtacagcaggcagtggtgcctgtgcctgtacctgtgcctgtgtttgtgccgcgggcaccgatgtagacgcagaaggagccggaacaggttccgcagcccgagtactctctatagcatcatctccccgagcctggtgctcattcccaacagttatagagtccccactcgaagccggagccagagcaccagtatcagcatcagcctcggcctcggcctcgaccgtctcccgttggccctcgacaccagaacacccgtccacagccgcaacctcaccctcaacctcgaccccacgctcccgacaaaccttccacaattccctcatagcctctagattcccagccccgcactcacgacaagtccacccaagcgaaagccgcgcatactccctccgcagctcctcactcccctccatgcccccaacctggccctgactctccgaactgaagatctcagagcggatgcccagcaatgcagtgcgcacgccccaagccggctgccatgtctcctcgtggtggccggaaatgctgaggcagatttcgcggttgacttcgaagcggccggagggcgtgaggaagcggaaagaggggggacggagtgggtatgtggctgggaaggtgatacggccgtggtagaggccttgagcgtagggggaaggggaggggggtccggctagggtgaagtgccagtcgtggaggtttgtgtcgtttattggggcggctgtgaagtatggacttgggtttttgtggaggtcgctgctttctttcaggaggcggcgggttgagggggaggacattttggtctttgtgtctttggataggattagatttcgagtcgaggatgttctaaggttgaattggacatgttgggaggaagaaagagcgataagacaaaaagataaagatgacagctgtcccgggtttgcgggggaatgatgctattgggccgtggcaacgttgttacggacgacaatataggattcggaatgattagggcatatcttacagtaataaacattgtacaataggaattaaggtctaatggacatgaaagccttaatatgaggcatccataccaaggctgcgcatacgctttgtagatgccataaacacaacgccttcaacatgctacttaaaaatgctacaaacaatcacttgttcttagtcccaggcccgccattcatcatgatcacggcgtgtgggttgctggcggccagcgcccggatccaataacccatcgtcctccacgtcatccccataatcactatcgccaggccgcggccgcggtgatcgaggtgcaagagtctgcatcgacaccgacgtcggaggtcgatcaggcaggccaccgcggcttgtcacccgctgctgtggaccgcctcccatccaactattactgttgtctagattgcgctggtacaactcacggtagtactgctgctcctcggtggattcctgttctcggcgctgtcgcatgcggtcccgcgcttctaggaatttagcactaggctcccagtgccagccatcgccagtagttgtgcagatgggcacagcccagagcagcggccggtccccgaaaaggtggagcaggttacgccgccagccgtggtcaaacgcgctgggcattttttcgttgtcttcgtcgttttgatactcctcgtaccgcgagtgctcgcgctgccgttccatttcggcgtatgaccgcgtcaacgcttgttgcgctggcgtgaggccgttccctgagccgtctgggggccctgatgggcgcggcacaggagatatgccctcttcgggccgggtgactcccgggattgcattggcgtgggcatcgataatctgatttccatagtcttgcattcggttggataagctttcctcgcccggctcgccccaatagttattgttgggcgccggttcattccgctgtctgtatagcgctttgcgcaaaggcgacacatatcgggtcctttccaaacattcaatggtagtggtaccccgtatagctagactgatatgccaggctgtaaatccacccaaaaccaatccaatgatgccacccaggatagccagcagaactacattgaccggaagaatagtatccatgtactgggtatcgtttaggatctcggtccagacccagacggctgaaatggcaaaaacaacccaacagaatatcgaggtgtagatcaaaaatagcaagaatgccttataattatgcagcccaacacatgttgccagccagggacaatggtggtccatcttgaggacacatcgtctgcatgtcgagcagtggtgcgcgcggtccggcttcggacactggcattttttgcagtatcgtgattcacctgtcgaggtgacggtatacgatgtgaactccgggtcttcggagggagggagggcgctgtactcatgacggtcggtcccgcgactagtagaagtcggtgaccccggatcagtgaaaacagcgacggtatatgagaaattgaggagggcgtagagggaaaatgcgaggatggaactcgggatacctaccgatatgttagtacacccggatacatagccccgttcgagtccgagcgatatcctgcatacctatccagtcactccgtgacggtttgatgccgatgctgacagcgacgtatactgcccatgtggtgaggccgtagacgaaggcgagtggaaagcaggttgctgctgcacagcagtaccgttcgcagcggagagcccaggctcgagggcgtcgtttcggccacgagggcgaggtcgggggtgacgaggccaaggtggccatgactgagatttatgacacaagggaaagaagattatgcattaaggattttgacgggatcggtcccattataggcaaagcattgaagataagacaagtctcaggaaccgtacctacaatacatatgcgatggaaacgaggctatcaggtgagatgtacggtaaggtaaaccgggtacggtaattttgacatgctccgccacggccccagccacaagaagtgcgtacaacatacgtgggggacacgaagtatcgtcataacaatgttctatttacggcgttgaagcatattttcaggaacagggaaggcatagggaatattatcaaataatcataggacactactttatatactcgtatgcatgttggggtaattggtgatatatcaatatttacagtcataattctaatagattcatcacggctctgccttgaaatgcaatgcggattgttctcgaacgtaaaaaaaaaggccgaatcagctgctggtcgcattggaggtcggcaggttgttctgtgtacaccagccattgacgggcagacaactcaaccgatagcaccaagagcagttcgaggaggggtatttataaaaatcgataagcaacataatgaaaccaatgaggaccgcgactagggcgccagcacgaaccaaccaccacagccaccaaagagccttgcggcccttgaagaaaccgagcgggccgcctgtaggaccggggttttctgatgagtgggaggtgagaccccgtttgctcttgaagaactccatgaaggggatagtcttttgctcgggaccagcttggccagctccgccgctcatggcaacatatggctgtcgtgccagaccaatccgctcgcggagagcgttaggcgaccgcatgatagtcaggccaatggcgagacccatgataaagccaccaatgtgggagaagttgtccaatcctgggagaagaccaagaacgaacgagacacccactccgagaagcatgatgataagctcaacccacggagattcgcgctggggccagtcatacagcaggtcgagaagataaagcgctaggataccgaatagggcgcccgagcagccatcactaggatcgagctgcgcggcgtagtttccacccaaaacgaacccgaagataccactggcgaagtaggtcaaggtatagcgccacatgccgaccatacgctccatgtctgcacccatagtcatctgaaccaacaggttgaatccgatgtggatgaatcctccatgcatgaagatggggataatgaatctgtaccactggttgggagccggccgatcgtctgttgaccctccaatagaggggttgggaacaccgctaaagccgcacacttcagacagtgtacaacccgttcccgtcaccgttgtcgatgtggcattcggacagagccacgaaagggtataattggcatcttggattccctcaacgttcttcatgcacgggttgtagcgtgctcccatgtatatttggacgtatggtgagggcccgatcatcggattgaaggtaggttttgtctcgatcactgaccctgtcaactgagctggagcggaaaagaatttcgttagttagtccgaaatgtgggaatcgactgagctaggaacagaactcaccattcttgaccagttcgataatgaatacgatgatctgggctaatgtcaagatgtatgtcacccaggcaatcttcttgctgaaaaatcccttcttctttcggccgtcacgttgtcggctatcctccagaccccctggtgatggagggtactgcgtctgttggcgcatccaatctggattgtttccatactgggcattggtcttcagaggtatattttctgcgtaattatcgccttccgttgcgcgcccggctgtctggtaatgtccattgtccgatgcaaatgactgttgactctctcggttgtgataaggggctgagggatcgtcgtgattgtaaactggggttgcgtagccgagtccaggagctgtgtgcggggcgttatctgtctttccggggacagcttggtcgtagctggggggttgtgggatatttgcgtgatagtattcgttggaggccatggtgcctggggttgagtctttgttttagagttcgggagcaaaaaggcgaacccgtgaacccgttaagatggttatagagagcttaagtggtgaagagtatatataacaaagagcaacccagatgaaagaaaggtaaagtcaggcagtcgcattattcgcgaagttatttttgggcggatctacgcaatcccagcaatgccacagccgcgtggctggggcttttccaccgaggattttccactccgccctagcggacctggttattggttacttttccatagggctgctaacgaaggggcgacaaaattgcgtcgtatctgactaatttatacttgctcttttctataaagataatctcgaataaattcccaaggtcccaaggttgtgcctgatccttacattccggcttacgtaatacacagtaaacagcctgccaaggctcctaattgggattagtgccctagatgtgaaaccttgttttcccagagtgggggctcaggccgtccacgtgatgagaagcctttttagtcaaaattgtgcccagaagagcttaggcgttctataaaaatatccaaggttgtagcgactcaactgttttggaagcctctgtagcaaagaaggtctgctctcggtcaattctttgattttaatgaggtgtgactgtataacttatggacaattctgctagagaaaccggtaccccacaagatgatactccaagatggagcggagctaaaacgtcacctctagggaggatattgtttaatgtggggagaaaatctgcgtagactactaacgattattaggtttctgtcaaagagcaaggtaaataaagcaataaggtcattatgatatgtagagtatagaggttctcctttcttttagctttctttccttgaagataatgtaaatgctaactagctagcagagagaatctaattgatcaaatgcggtatttaatactagctcaattatacgaaggggttgaagtgaaaactctgcagattagcacaaacctacaatttaattttgatctctttgatctatcactatcaatttagatagctctcatagtgacctctgaattcatggggttgtaagtcatgtgaacgatattaagaatacctaactagacatacctaaagtagtttagcggggactgtaacaatattgcgtcggtagcccttcttttcctctttcctctttcctctttccacctcctgcttcattgttgccgctatgacagcagcacaccagagcgagactgaagataggtttcttctcctgcgcttccttgcaaacattgagatcccagagacgatcaccaaccatgtctacataaccaaccttcaatccccgatctcgcgactgagagatcttcgttcaaatcgaagtcagctccaacaacacctgagcgccagtttgttacctttgtcaatgtcggaataccacaatcaacagcttcgagatcagcacaacctagattcaccagtgtgacatataaatctcgcatgcgttggctctaaacgaagactttatcttgcaactcgtgaaaataagacgtatttgcgaactcactatcggtggtcagattgactctgcaccgacatatgtagcgtcagaccaatacatcatctttatcagagaggcgttttagaatcgaaagttgcgccatttcaattgaacgacaaggtcaagatactagagagtaaatggcaaggctctaaacccctcgaccaagatactatcaacacattcaaagaatgtttactctccaacctctgccggttatcatcccgggctaggggcgaggagtatacacaaaagtcgagttctttctactactgtcgatcagcagtctatcacaatctcagctcactggaccatttctccgaagattcttataacatcttcttttattcctaagtcgtttgtcactgtgtgtatcacgcatacaaaatggagtgaattgtctgaattgtattgaggataagattcctaaatcattggccccgactaccagcaatctctctacttcgtctactcgcaaacccagttctgaatatataatgacagaaacatgcactctccaacttccaccgaattggataaaacaaatagagctccatttgcacgaactctacggtagaaaaggactaaagtgtgtcgaatttcgtacagcgtaatttaccactagaccataacaaaaaccaaggttcctgtttagggcctagaggggccatatcccattcttgacagaaaacattgatgtcggaaggaattgcagacaagatgtgctgataaatttcctcgggttcgtcggataaacttcatgatccagctgttggtttgtgaattctagagcaatcgacctgagtgcaagaagtctcaagagcttgtcctcgggactgagtattcgatctccttctacgcaccttatgtgctcaaatcgaaggtcatcacagtttcgcttgcgagatagtagctggcttaggaacttctggccagcttcctatacccagcttgacaaagtgttcaattaagggtccaggtctatagttcggagatgtgatcggcccgtgtttcttcccaaggttgggattctgccgctgatgtcatcgccatgtttcatcttccccgcgcctgcgacatctaatagtcaacaccatcaccatggacgaccctcttatccaagcattgcctccggctacggactacctgacttatcttactctgctagaatatcagttaacccccaaacgtctgccacttttgcacaccctcctgcaagatgagaagcttacgacgaacatcggctgggacttggtcaagctgctgctgcccatgctaccagcgtccacagaatgcctacaggatgtggctcgcctaggcaatccccgagaagtgatcttgcgcgtctctgagtctttgatgcaacttcagccggaggacgcggacgaggatgaaaaggctggtcagggactgcccttgcacatcctacaattcaattgtcttctcggcatgctttcggtacttcacacacggatccagacaaaagcgccaagtcggttcatagcaacctccctccaagcagcactggaagcgtatgccacaatggtgaccaatgagaccaccctcgccttcctcgagttcttccgcgaagtgtccccctccaagcggcctgcaccaccccccagaactgctagcgagtcgagcgtcctgaaagttgccgctgcctcggcaccagatcccgaagctgaggtatccacgccctctccctctaccgataacgaaaccctccttgttcggaagttcattcagttcggtttgcttgaactgctgaagtcatatcttttgagcttctccagtccaatggacccgggaatgtcgtggaccattcgcatgcaggaacacctgcatccggatctgcggctacccggcaccaaatcgcagaccgatgcatatggatcgaccaaggagctcaaggagcgcgatatggtgatgggaaaacttatggtaagcaagatattatgaccggcattatatcaaattggaggacgatttatctgactttgcttctgcttaggctctatcgcgagacgttggaattgataacgaggaactcttgtcaatcatatccggacccccgacagatcagactgctccacttgatttcgatgaaccaccaataaaccccaaccagattccgctagaacgccatggttcactcctactactagcggctcgagctgcaggcgcaactctctttacctctgggcaaccgctccgtcaggtatccgttttccctgagctgagtcagatatttaacaactttgtcggcggccacaccaatctcgacgaagtggctttcggtcaaccccatgcgcttctcgactccctgctggctttgactgtctacgcactgcaaacccccatcgaattcccgtcaagcgataccgagtttaaggatttcgttatcatcttgactgcatgcacatcacgtcagagccacggcatagttcgccagatcccagctgccattgtccagagccatccgtcagctgagacgcgatttaagctcatatacaagatcttggaagatgaccatcttgcctcggcgcgggatagcgccatcgcatggctgaaggatgaaatactccgcagtccccaatctgccgacaatatattccaggatcctctctacttctgggctctactgccggctcttttcaaaccggtcactgccgccagctcatcatccgatctcgttgctagctggtctcgtctaacccaaattcaaggcccaccacttcattctgcgttgaatctgtattacttgctgctttcctcgccatcgctacgtgaccggctccagctcgacaagacttctaagttcttccgtaaccatgtcctgaaccctctcaggcaagtgttccagagcttcgaggacgatctcaccgccaaaggaggcgagggtgttattgaagctgcggtgggcgaggagatgtgccagattggcaatgcacggtctatcggacttattggtcttacactagatcaaatcgaggagacatccagcgatgcatttggttccgatgaaggcgatctgggcgaattttccgaggctgaagaggctaaggtgtctgaaatccggaagaaggtggatatctgggaataagtacagatccaggttccttgtacagaatttagtagatatgatgtttctacgaatgaacgctttcgtcaccttgtatctaaatttaatcagagtattacgtagctgatgattcggtccaacataaggaagcacgaggcttgccccctgtagaccttttcctctcgatacagttgagctacaagaaatatctaaggaagaagattccttgaggcaatgatccattcctgtcaactatcatgaccgattctaactaagaaataaagccttatccacccaagccacccccgaaacaagaaacgaatccgcaccacattgcaaaagagaaacacaatcaaccgactttaaaaaaatatgtaatgtgaatccccggatatagttgaaggaacggaaaagaagttcctttttaaaagaaacgttgtcacccgaatcgtccacgaaaggttcgaaagagcacaacaaatcggagtcggcagtcgtgaagaccatcggaagaaatgagctgtctcgtcgaagaaagaatgaactggacagatagactcgcaaagagtcttcacaaaagcaaaagcaaagctgagaggtcatgtttcgaggggttgatatttttggttgaaaagttgaaaggagtctcaagagtccgcggcgaagattgcgaaaaaaaaatgatgcatttcaatgtctatcatggtgaccaacgaaccaagtcaggccatggcggttgatggaatgttggaattgggcgctctcatggagggtgtttagaagtcagcggctattcacgaagacatgtcagtatataagtcattattggggaaacaaatggtactcacggttcatgacgacgcagccgccaccgggggacttcatgacgacgcagccaccgccaggagaccgcttcatgatgtcgcagccggctccgggggttctagtgaccacgcagccgttgggaatgggagacttcatgacgacacagccaccaccgggggacttcatgacgacgcagccaccgccgggggctattgagatgacatgtcagtatatgaatgtataaaagagatgacgaagcattgcatgctttggaggcaagctactcacatcgcttctggacctgagcacgagacattttcgaagatcgagaagagcttaagaagctgaagattgaaaagattgtaggttgtttaaatgagaatgtgagcgggtggtggaggaaatcattgaaactgggtgtagaagatgatacttatactcgacgagggactatttttcggactatcaatacaatcgagatcctactcaaggagtggaagttaatgcaagagtcacattgagttgctgacttgaatgcattgggcatccatggattgtcgaaggcatagagtcaatctagaatgcatgaggttccgattgtagtggatgcccattgcggggctggttgatattgttctcgggttcatgaatgtaggcgtcgttgcctctggaattggctctttgttttgatagtcagtcagtgcatctatcgggggacgtcgatatggatcgcatcgcttatcctccgaggcgtgtctttcatgaaggaacgccacagagatggccgaggaacccctgttccaggcacgtgtagttagcacattcaacagtctttcatggggtaagaacaatattaagccggggtctcaagtaacaaagaacatttcggagtatgtgtttgatttcgcccaatgaggatggcatcgtgaacaaagaaagcttaggttgaccaatcgccacaatcacatttctcttacgattgttcctcaggaacaatatcatgggccttggcatcagacaaatttgagatcatattgcacggtgttgagtatcgatatcattttcactcagaaacatcaaagagcacatcgctaccaaaataaagaggaagttagacttcgcttgggctaaacaatttagctaatggaaatgtcccaattcgagaataaatgatataagcaatgataacagtcccaaattggcaaatgcaatctccccttaggtgtaaagcggctcggtcacgtcattgagagtcaatcccgacttggcgacgtcttcctcgatcaagaacatcaaaggcatctcaacgagagtacccttgacttggctaagcagctctttgacctgtttcgccccctctgcgccaggcgcaaagtcatcgctcacaacgtggccccattggaatcgcgctggacgtgcagatccttccttgccttcagggcttacctcggtcttgtggaaatagtactcgtagaactccttgtactctgtccagttgcggattgtgtcgtccggaaccgcgtggaataccttccggaagacttcggtgtttgtgtgcgcccgtgagttccaaaggctttgagcagtgtcggcaagcggatcagcaacgatcttgctctcagggcagtcaaagtcgaagttgttgggaacccccacgggctcaaagttcgcgtccggtcgttcatagtcttgcggcggcaaaagtcccaggtgcttccggaacaactggcggcggagagatgaagcaaaacgactggcagtccatggcttaccatccatggtagatgccacaggtgtgaaatcctcgatgatgactgcgatctcagagtcgtgatcacccaattgagaacggtcgttcagatttgcggatccgcaaacaactacacgatcgtcggcgatcatcacctagtgctttggttagaatttaaatcatcgtcgaatttggcgggaaacgaacctttgagtgaacgtaaagctcttcgctcacaaacgcattaatctcggcatcgggatggccatcccacggcactttacgaatatcctctccgttgagcatataacattcgctcacactgtcccaccggcccgaggaagcatgaccgccctgtacctggcgtgcagcctgctggtacttctcaaagggtgcggtagtatcgaaagcactacgggtagtgctcggggcatatccaccagggcccgcagtgttcaaatcgtactccctgcgggcatcctcgtatttgacgccactctgctgttcagctgcagccatgataccaccgttgttaatccgatcgtaattgcgaaggttgtagaaacggatatactccatggggttaaatccttccttggcaatcaacttaatgatacggcgaccaccgcggttgatggagttgtactggaactccataatcgcacgtgttccgagagtagcatcatctcgcaaatcaccggcaaagcagggaacagacgggatgaccacgacaatcttatatttctgaccagcacgggcagcacgtagaattctctccacaattgcggcaccgatctgattttttactggatgctgcgaattaccggtcgcagtgatgaagaactggttctcgatgtagacaaagtgctcactgtttcggatgatggcgcaatatgcgtcggcaattgaatgctcaatctgggtgccattgctccatttcgcacagctgcgaacaatctggcatgacataccccctcggccttgcgacgaggaagggcggccatatgtgaccagtcgatcctggtattggtgaatttgtccggcgagctgaccacgaagggaggtgccgtattgggtcagatcctctcgcaaccgacgaggcgcgaagcctcgatcacgaacaccgaagtggctttcggtcaaccccatgcgcttctcgactccctgctggctttgactgtctacgcactgcaaacccccatcgaattcccgtcaagcgataccgagtttaaggatttcgttatcatcttgactgcatgcacatcacgtcagagccacggcatagttcgccagatcccagctgccattgtccagagccatccgtcagctgagacgcgatttaagctcatatacaagatcttggaagatgaccatcttgcctcggcgcgggatagcgccatcgcatggctgaaggatgaaatactccgcagtccccaatctgccgacaatatattccaggatcctctctacttctgggctctactgccggctcttttcaaaccggtcactgccgccagctcatcatccgatctcgttgctagctggtctcgtctaacccaaattcaaggcccaccacttcattctgcgttgaatctgtattacttgctgctttcctcgccatcgctacgtgaccggctccagctcgacaagacttctaagttcttccgtaaccatgtcctgaaccctctcaggcaagtgttccagagcttcgaggacgatctcaccgccaaaggaggcgagggtgttattgaagctgcggtgggcgaggagatgtgccagattggcaatgcacggtctatcggacttattggtcttacactagatcaaatcgaggagacatccagcgatgcatttggttccgatgaaggcgatctgggcgaattttccgaggctgaagaggctaaggtgtctgaaatccggaagaaggtggatatctgggaataagtacagatccaggttccttgtacagaatttagtagatatgatgtttctacgaatgaacgctttcgtcaccttgtatctaaatttaatcagagtattacgtagctgatgattcggtccaacataaggaagcacgaggcttgccccctgtagaccttttcctctcgatacagttgagctacaagaaatatctaaggaagaagattccttgaggcaatgatccattcctgtcaactatcatgaccgattctaactaagaaataaagccttatccacccaagccacccccgaaacaagaaacgaatccgcaccacattgcaaaagagaaacacaatcaaccgactttaaaaaaatatgtaatgtgaatccccggatatagttgaaggaacggaaaagaagttcctttttaaaagaaacgttgtcacccgaatcgtccacgaaaggttcgaaagagcacaacaaatcggagtcggcagtcgtgaagaccatcggaagaaatgagctgtctcgtcgaagaaagaatgaactggacagatagactcgcaaagagtcttcacaaaagcaaaagcaaagctgagaggtcatgtttcgaggggttgatatttttggttgaaaagttgaaaggagtctcaagagtccgcggcgaagattgcgaaaaaaaaatgatgcatttcaatgtctatcatggtgaccaacgaaccaagtcaggccatggcggttgatggaatgttggaattgggcgctctcatggagggtgtttagaagtcagcggctattcacgaagacatgtcagtatataagtcattattggggaaacaaatggtactcacggttcatgacgacgcagccgccaccgggggacttcatgacgacgcagccaccgccaggagaccgcttcatgatgtcgcagccggctccgggggttctagtgaccacgcagccgttgggaatgggagacttcatgacgacacagccaccaccgggggacttcatgacgacgcagccaccgccgggggctattgagatgacatgtcagtatatgaatgtataaaagagatgacgaagcattgcatgctttggaggcaagctactcacatcgcttctggacctgagcacgagacattttcgaagatcgagaagagcttaagaagctgaagattgaaaagattgtaggttgtttaaatgagaatgtgagcgggtggtggaggaaatcattgaaactgggtgtagaagatgatacttatactcgacgagggactatttttcggactatcaatacaatcgagatcctactcaaggagtggaagttaatgcaagagtcacattgagttgctgacttgaatgcattgggcatccatggattgtcgaaggcatagagtcaatctagaatgcatgaggttccgattgtagtggatgcccattgcggggctggttgatattgttctcgggttcatgaatgtaggcgtcgttgcctctggaattggctctttgttttgatagtcagtcagtgcatctatcgggggacgtcgatatggatcgcatcgcttatcctccgaggcgtgtctttcatgaaggaacgccacagagatggccgaggaacccctgttccaggcacgtgtagttagcacattcaacagtctttcatggggtaagaacaatattaagccggggtctcaagtaacaaagaacatttcggagtatgtgtttgatttcgcccaatgaggatggcatcgtgaacaaagaaagcttaggttgaccaatcgccacaatcacatttctcttacgattgttcctcaggaacaatatcatgggccttggcatcagacaaatttgagatcatattgcacggtgttgagtatcgatatcattttcactcagaaacatcaaagagcacatcgctaccaaaataaagaggaagttagacttcgcttgggctaaacaatttagctaatggaaatgtcccaattcgagaataaatgatataagcaatgataacagtcccaaattggcaaatgcaatctccccttaggtgtaaagcggctcggtcacgtcattgagagtcaatcccgacttggcgacgtcttcctcgatcaagaacatcaaaggcatctcaacgagagtacccttgacttggctaagcagctctttgacctgtttcgccccctctgcgccaggcgcaaagtcatcgctcacaacgtggccccattggaatcgcgctggacgtgcagatccttccttgccttcagggcttacctcggtcttgtggaaatagtactcgtagaactccttgtactctgtccagttgcggattgtgtcgtccggaaccgcgtggaataccttccggaagacttcggtgtttgtgtgcgcccgtgagttccaaaggctttgagcagtgtcggcaagcggatcagcaacgatcttgctctcagggcagtcaaagtcgaagttgttgggaacccccacgggctcaaagttcgcgtccggtcgttcatagtcttgcggcggcaaaagtcccaggtgcttccggaacaactggcggcggagagatgaagcaaaacgactggcagtccatggcttaccatccatggtagatgccacaggtgtgaaatcctcgatgatgactgcgatctcagagtcgtgatcacccaattgagaacggtcgttcagatttgcggatccgcaaacaactacacgatcgtcggcgatcatcacctagtgctttggttagaatttaaatcatcgtcgaatttggcgggaaacgaacctttgagtgaacgtaaagctcttcgctcacaaacgcattaatctcggcatcgggatggccatcccacggcactttacgaatatcctctccgttgagcatataacattcgctcacactgtcccaccggcccgaggaagcatgaccgccctgtacctggcgtgcagcctgctggtacttctcaaagggtgcggtagtatcgaaagcactacgggtagtgctcggggcatatccaccagggcccgcagtgttcaaatcgtactccctgcgggcatcctcgtatttgacgccactctgctgttcagctgcagccatgataccaccgttgttaatccgatcgtaattgcgaaggttgtagaaacggatatactccatggggttaaatccttccttggcaatcaactccatgatactgtgacctccgcggttgatggagttgtactggaactccataatcgcacgtgttccgagagtagcatcatctcgcaaatcaccggcaaagcagggaacagacgggatgaccacgacaatcttatatttctgaccagcacgggcagcacgtagaattctctccacaattgcggcaccgatctgattttttactggatgctgcgaattaccggtcgcagtgatgaagaactggttctcgatgtagacaaagtgctcactgtttcggatgatggcgcaatatgcgtcggcaattgaatgctcaatctgggtgccattgctccatttcgcacagctgcgaacaatctggcatgacataccccctcggccttgcgacgaggaagggcggccatatgtgaccagtcgatcctggtattggtgaatttgtccggcgagctgaccacgaagggaggtgccgtattgggtcagatcctctcgcaaccgacgaggcgcgaagcctcgatcacgatcaccttcatactggtggtagtcatcaattccacgggtgttggagtgggatgcttcctggcctggtgggggtgggtaatagggcgtctgctcctgttgctggccatgatagggctgatacgaggtgtcggcactggattgcgctggtggtggaccaggcggaggaggggggaatgagttcccagtgtagctgtactggcttgcgtcatgaccctgggactgagcggattggggttgatagcccagaggggtttggcttggcactgggtggtaggttgaagcattctcagcttggtacgagggagacgtgttctgctgctgatattgatgctggtttgaggagatctgagtcggcgatggcgcataacctgaagtgctagcactggtgtgaggctgatatacgccggcaggttcttgatgctgaggctggggttgagattgcgagtgcgactcctgatacgaactcgacgaagtctgacccggtggcggcgggtaggtaggtgatgcgactccactgggcttctcttgccaggatggcacagttgactgaccctgcgtgctcgcctgccccgaggggtacacgttggactgaggctgggtctgagattgcgagtgcggctcctgatacgaagccgacgacgtttgacctggtggcggcgggtatgtagatgatgatgcgacttcactgggcttctgctgccatgatggcacagttgactggccttgtgtgctcgcctgtcccgaggggtacgagttggactgaggctgagactgggattgcgagtgggattgcgagtgcgactgtggctcttgataagaactcgacgacgtctgacctggtggcggtgggtaggtagatgctgatgcgactccactgggcttctgctgccaggatggcgcaggttgctggctttgtgggctcgcctgtcccgaggggtacaagttgggctgtggagaagcagcctgctgttggccagtcgagtaagcgggccttccatggagtgccagtctcgtgtatctagattcattgcgaatcttgtatttcaaatcatagatgaaattccatcgctccacaaagtgacgtcgcaaatcttccacggctgcaccgtgcaggctcacggatatatcagaccatcccatccgagacatggtctttctgtccaactggttattctcccaatggacaacatcttcgaaatcaaggacgcgagaattgttgtagtcctgcccagggaacacagtctggttgacatccgagggatgtagatccgagaggttatgttggtttgtgtcccagcgaccgaagcacaagtccaagccacccatgaatgcaatttgaccatcgatcaggcaaagcttctcgtgatgagcccagtacagaatgacatcatcgcgcattccgtacagtcccttcaatgtgtcctttgacatcttactcaaacttttcgagtcgagtgacaggttctgcaaggtcgactcgatgtcagctgtcatctcctggcggtcaggcaggtggtcagggtgacggaagacagagatattggggtgcaaatcttctagggcatgttttgtgtgagaagaagacactgtagggactgttagttggattcttttcaatgttcaagaatcatggacatacgagtgagcgcctgcgtaacctccttgtaaacgatgacattgacgcgcacgccccgctgggctgcagcctgcagcatgcgatccaatcggtactgttcattcttcgccggtggccttctcagataaagttcgggagataaccaccctacattaagttagccgcatgcaatgtaaatccggggaagattgaaactcacagtccagaatccaaatcgactctcgggcgttttccagagcccgcgagacagcccagaaataaccgcatccatccacataccacttggcatcgttatgttcccggacaggggcgaagctatcaaatcgatgctctgtgttggtattgctgggaccatactgggcatacgcctgtggatcgatggtggtaccgatcttctgggcaaattcagaaccaagctcggtcacagtaccttgaagtttctccaagaaatcggacagtttgtcttccttttgaggtttcccatagtagttagggttttgttgctgtccacttgtgctttggctctgatcatatccgtattgcggttcggtctggctctgctgtagagaaacggttagttaatgtaaaaggtggaggagggtgaagcctacgccttgataaccctggttacctgggccggaggatccgtggctcttgtaggtgtcgcggaacttcttgaacgtatcgcctagaccgcgggaaccgtctccggacccacgttccgagccctggtagtagccaccataggccagatcatcctggttggacattttgacggctcaaagtagtttgtagatgcgataagataaagatcgttgaacaaacagaaagaaattcagaagagtcaagaaactaggatgcctgcggagcggggtgcgactgttttaaatcgtatgaaggccccgctacccagcccagccacgatgggaacgtgttggatgtggcggtgtacttgtacgtactcatgagatggcacgattatctttccaagttgggatattgctgtattcctatatataggcaatagaataagtgagactgttagatgtattcttactaaatggcacttatccgagtacaaccgaggatatgtagatatgtcacacacctttccctccgaataatgagctatttgacggcaaaaaaagacaaagaaaacaagaagctatattctgaaacaaggaaaagccctatatcaaacaagaatgagtttcaggttcaaacatgaagccaagtgtacttctgcttttgggaatgcgggcttggcattcggatatccaggaatcccccgaggtccactatgaaccttcataccctcaatggtacggagtacggagtactgcaatgcccacaggccaagtaaaacgaacctctcttgggcgaccccgaaagccagccgaagatgcaaaatccgtgaggccccttcccggcgagtggagatcagaactcggtctcacctctggcacagatacgacgcgcccaggtccgtgaagcgcagcaggcataccgatctcgccaacagtcccagctctcttcactaaaagctcgcgtagagcagctggaagatgtgcttaaccagctgagtcagacggtacatgcattcgataatcaactcatccagcatggatcgcaatggtctcagcctcaacttctccagacagtccagttgctgcgggatgatataatgtcccatttcaagcgtgccgatattcactttcaagagtctacagaggaccaaccctcagaattatcccaggctgttaatgagcaaccccacgcgctggtcgcgtccgaggtgtcagccggcagattaaaagatcacacttcggggtctgacttttggaaattatttttgggctcatctgctggcataattccgtcgactaatacccagaacctggataaccaatcgaatgacttggtttcaattcctgtcgcaccatctatcgccgaaacacataccattcaatatgcaaccacgcccttcacccaacggcttttccgcgcttgcgctgaaagtggccatcgatttctgtcgaatctctcatataaagatgaagatatgtgggagtttggactactgctacaaagaatgccacgagcagagatccaacgttatttcggacgtgtcatagacatggaaccgtgcaatcctatcgtcgatggccgattcccatatgtcagcctcggtggtgcaggaacccattttttacaaccttccagtgactccttttcagatagcttcgccctcttccgaacagcaaatggcgtgtctcatattcctgccgttgaagactggtttgatgtgcatgatgttgagagatacctgctcaacaaaggcattattgcaggcgaatttccttccgcccttacgatatcttatccgtttagtccggatgccaggccttcgaacctagagatccctcaaggcgaattacctggcggtatgatgatggtcatcgacgagtataaattgatcaacagtatggttacactgttgttgttattctcggtgaatataatagaagctaacatagccaggattgagccagcttccagtcgctctgggctgtgtggctggctttcgccggtctgatgtcgagagggtagtatcccacaatgtgaggtggatctcagttggatttactggctcgacagggtaggcatgtgtgcattaatttatttgaacctgcggagtatcacaatttcctatttactttatacacgcaataaatcagacacaatctgtttgtaaccatctacttacccttgtttcgtccaagtcttgcgagttgctgcgacttcttccgttgattatatggccattcgacgccacaattgcaccaccaagtactctagattgagctagagccccagaccatgccggcggaaagatatccgactcatgacctcctcccgccaataccatacagccgccacagtcgcacccggtccaattgccacggaacctagaatcaaaccagccagtgcgacctgccaagagacattggacactccaatgcggtacagatcccacacgctagccagacaccacaggagagttgccaccgaaacaagcaggaaatcgttctggaagaatacgaagacaccgtccgcaagtgttgccacctgtgcgaaggcatcggatgggatgaaggcccttgtaataaaacctgtccccaaagcagcccagctcagcaacaaggccacatggaaacaagcagatacaccaccggccacagcgtagagggtttgcaagtgtgggatgtcacggtttggtttgctctccgctgcggagctatcggtcttggccggtgtgcttgaactgatcgatttgatgacacgggagaatatgtgagtcaagataagcacgtataccggagcgggctgccacagcgcaatgaagacctgtcgcgtgttcggggcatcagccaatgggaagaacagcatcatggtaggcacgacgaatcccaaaatcaatgctggcagtatcgctcgagcggtggattcgggaagtgtgcgggtacttggggaaaagtatgctatccccgaagaaacatatgtgcttgatatgaagaagagcggtgcaatcaacccaatccctcgcaactggtatagaaccgcccacaagctcggaatggcaagaagggtccatttgttccttggtcggaaaccttcaaccgtccagatagcgataatcggcatcatcgagcctaggaagtacagaacttggaatggctgctccggctttgagaagttggagaccgctggcaggaatatagccaccatgactttcaaaatgaggtcaacaggtcggattcctgtgtacacctggcgaaggggagcttcgattcctcccgggagttgaaccgactggttctggattgactggcggacgaaccccattgttccatttgctctgattgctgccgacaattgacgatggcctaaccaggctaggaggaagtatgcagcgtacaacaagatgctcaccacaccccgagatgacggtgttctagaacgctcgtcgaaatatgcaatttctcgaggcctgtgcggcagtggaagcatgtccaaggacactgcgggagaatacgtgtcgatccatttgctgaggacagtggatttggagaagcgtggcaccacgtatcttgctatgaacttcaaaaagggcgtttccaggcactccagacgttgccgggcatgggatactttgatcaatccccatgcacgtttttcacgctgctgttgaacgccctcaaagattttggaaatttctgctgatgacagggtgcctgactggctgtttttcaaggccgcaacgagatgattggtcagggacgcggcggtttccattgcattattgcctccctggcctgtcaacggctcaaactattggacggggatattgttagtcttcgtatgatattttcggagataggtagtctcaccttgtgactggcatcgccgatagtcatagttctctggaaatgccatcttttatagacttattctggcagactgctgtatgccgaggcgattttgctcttatacagagcggaaaattgcagcgtgggagtaatctggtcgtcgaaatgttccgttgcgactgcctcctcctcttccttggtgaatcgagggatatctgcgccatagtacgttttgcccatgttccgcacgagaaaccagtaggtgagatctccgggtccgctgggaacaagatacgagaaatgctcattgaacaccgagttcagcgtgcctttctcgattcccttcactcctttggaaatgccgaagatgcatgcgtaagttgcaggcagatctttcacaatagttagttaacacttctcaagcgcttatgttttgattttcatactagattcctctgtgggatcaaaccatgtgggatctatcttttcggccgctttccacatttcttggcgcactttggaatggattccgtctgctccgaccacgatattcccggtgtaggtctgaccagtcgttgtggtcaccgtgacactcgaagtaccattctcaatactttgaacccgctgagaggtgagcactttggatttatcttggatctttttgtagaggatttctatcaacattcgtcgatcgaggaagacgatcggataaccatgactggaagtgatgtgagttgatgctgttcaatatcggcatatgagagacaaaccttccgattgaaacctcgtcaaggttattgaatgtccagaattgctgtccctgcgaatcacggaagcggagtgtgtcgacagggtattctgccatcttcataaccgactcgtaacaacccagctgatcgagaatgcgaaagccgtttggcaaaactccaaaactggccccgacctggggtgcaatgctgccgtacgcttcaaggatgacaaaatcgatgccattcctctctagcattagggccagcgaaagcccggcaatgctaccacccacaatgacgactttgaagggtttttggttcatgattgatgatcggaggagatttagaatcgaagatgcattgatatcctggaccgcgacttatatatgtcgggcgtaattgttgcaactaacccataatagaaagccgatcgtgtcaaacatctattgaactgcctaaatcggaggaaaaacgtgccgtgatcattgatcaacctgtcagccgggggaattacttgaatgatcaataatcggacccataggagtcaggcggaactaattacggacacggtgatccactatattattccatgattctattggataatcatattgatctacaatgtacggagtacatacggagtagtcgagaagaattaaaaagtacctctacctacaacatacaaagtccattgcatcaccagactgcgcaccggccagtcacagaaatcgtggtgccatggcacacgtattatgccttgtagggctccatcatgctaacaacgccaatcagccttcaaatgccaagcaattactagaataggtagatacatgtacctagtgtaactcacttaatagagtaacctagccgggtgaaaatccagccgtttcaattttcaagactactttgaatatgaaagaaagataattcattgttcagtatctaaatcagggaagtaaaggagaagaactactacattgtcctctttaccagatgattttctttgggcccctcactggatactgttggtctttcatgtgcttccatgctttgtgtctgtaaaattagcccaaccaaacacatttattagaagcctttgagatagaagcattgccttgtactttttgcacaaagctattcaccccccagtttatcagggctcgaatacttaatggacagatgccacagttccgttaacgctgaagagtgggaggaacaatcacagacatggatgcttggagaatctacaaaacctacagaatggagatacaaagagaaagtgtggatgatattctaggtaatcgtatatagaccagagagaaagagggggctatctactacaaaggagatttaactagaggtaattggcgtgcgccgttagcgataatgggacattccagactaattgatgctatgtatttataaaatcttcaccagcaccaaaatgtggactaccaatacagccgcaatccaatgctctccgctaagcaaatctcacagtcgcccgtaagggttataaggtagtatgtccgagtgctgatcaaggtaatcgtgggaatcatcaccactaagtcctcggagattgacaggcgcacttgtaaaaccctgttggccatgtctggatatccaccttgcccaaccaatgataagcacaagcccaagcccaataatgatcacagcgatggaatatcctattacaacggacttggacgcagatgaccaagtaagtccgatgcctccgttgacgatcgcgaggaagatgatgatatgtccaaagtagcgatggataatgccaaacctggtaggtgacttagtctgtttatatacccggtgatgccaaaatcccattccccactgagctagcattgcaagcagaaggataataccaaggatctggtgcgcggagccgtagttttgcgattttgtgaacatcgtgcttaggtaaaagccgattattatgccgacgatcgcaattgctgaagaaagtgtctggttgatccagtgccaccggacacttttcggagcaacacggaggagaacgacgccggctggcatcagaaggatgagagctccacaaaggcacagaccgtgaatgatgctaggccagttgctgtcgtttgtaattgatttgctcagcaccgagccagttgagtttgtatacgacgttggtagtccacccgaaccgccggttgcgcggaccatatccatagtgaagatgcctaggatgtcaaaacaaattagtgtccaggagcccgagtaaataccgttcaagtaagatatcacgaaccatattctgagtgtctctctatgtttgccgtttgagagttactgcgtagcatggcagccgaactaccagttggacctagcccaaaaatccacggctgagacgtggatttcaaatccaatgatccagtctcccactgggtgcagtttgagcacctagcattcacggtcatgacgttatcggagatacctgtaccattgagaatgtccaccttgatcgaagatgaatacacaggttcttgttcaccggaggagagacgagggctgaaggtaatatctaaacaggcgcgtcaggattgtcttctcagaggtatttgggtcacgtcaactcactttccccattggccttggagtagatcacaaacatgagagagtctttcatttcatttccagtcccgaccgcaatccatgaatagtccgtcggcccagacatgtggaagtagagatcggtggagccatcggggatgttgatagcaaaaatgaaattggcctggttctggctaagaggcagattgaaaatgctcgtagtagtcgagtcggacacggcagacgcaagggcaatagagtgaaataaatggcctgttaagagccagtgattctgttagataacatgtgaagcaataccaaaatggctaagcatcgggacctgaccgacctagcaaaatcacgacttcgggccttgtaggcagtcgcatgttggcaattgtaatctccctgtatgtcttggaaaggaattgaaaataccccaaagtgacacagctctaaattgatttcatcttccctctatttgacttcactatatacgtattccccgcttatctatgagtgacatctcgccttaacgtgattggcccggccagcatggtctgggcgttgaaaagggaacttgtcatttcctagggtctttttcagagtggatgcctggcactgccaccgtgatagtggagtttttggcttgtctaactagtataacgtacctattgttgttaggttccaggattaactgttttaactgttgtatgttccattaggggtttccacggataaatagcttatccggtcccacgatttattttaatgcttgtactaacttgtttaggcaatcttcaggtccccacatagccccacttccttgtgctgtcatatacttgtaacatcaaagttacacatacaaatgaggtaacacgtatgattcagcttcaattctttcagatctatgagaatataggtgaaaagtgactattcatcacacaagatgtatttcgtagatgtaaattttgctaggtagacggaaaaagacggaaaaggcttgattgtacaaccttgaatgaaccatagttagacattgccagtttccccgcagtacatctgtctcataacatcatcctcgattgccaagcaaaaatcagtcattcagcaattgaagatcatttacctaaatcaatccatcatgtctctcgcaaccctacatgtgagaatgcccattgtcaacccgcaaccccgctgacctcaatccagaccacagagcactccaatctccccgccgtatccacaattctcttcaaagccaaggcagcccacaagctgagcttcgaggaaattggcgagcacctcggtcgcaatgaagtagccgcagctgccatattctacggacaggccaaggcatcgcccgaagacatcgaaaagctggccgatctgcttttcatcccccagcaggctttggaggatcacctcagcggcttccccgatcgcggtcactccgtcgaaatgccgcccaaggagcccctcatctaccgactgtatgagattgtgcagaattatggttatgcctacaaagcggttctcaatgagaaatttggagatgggattatgagtgctatctcgttctcgacgaaggttgagaaggaggttgatgaggatggtaatgactgggctgttattactcttcgtggaaaatggtaagagtgtcttctctatgtgtgtgaacatcatctgacgaatgaataggttgcccttctctcggttctaggctgaaggtgttcctaggagctattgtattcacatggtttttatgactcccaacaggttactcctccaagttcttacttttctataccatcagtgagagaagtgcaggatggtagaaaaacgatagtcaccattctatcaagaatttagatatatctgacttcaggggaccaagtaaatccatctgagacagctcattgatgtatatgtagaaacctgtgttcagagttcatgtgtgtagagttacttaggagttagtaggaagcgttcagacagtgttatgttggttcgacctcaaaaaggcaaacgagcattgagataggaaagaaggaagaacaagaaaaaaaggaaggaataaggtatgggaggatcaacatcaaaaaaaagtccccattaatctagaccgttcctagacctcaggagggtatgtccaaagtacaaagtgcaatggtccatggtcctctcctccggcctttcccctatatgcctccactgaccgtactaactacgacctcccccctaagtaacggtggacggagtgccatgtccattcccgcggggggtttgcctagcacactgcttgcagtcttcgggagagctttagcatataggagtccgaaccgacagtggggagctaagcagtacccgttaaggcgaaacgtccgttgggaacgtaacgcccgttgagaacgtccctcgcaagggacgacccggccatactaccgctgggccactggggggggctggttgtaatattagtctttgtcttctttacataggacaaaaacttaaggaccaagtcacttgggatcttagacctccgatttatctgccttcctagttggataggagtttcaaatttagtacatagcatctacataagctgagctgtatataggctaacttttgagagcatctaaacatagaaaagtggtggttggcagccatttcaactctcgggtacatgcatatcaagtcaaaaatgagggtattcagacacccattttaggaaggcacgactacggtgagagctggctgaattctcaaagtcataggatcgattcccggcctcgtcaataaattcaatgcacttttttggggtttcctacctttttcccactatattgcccaatatcagaacaccatgacctccaaggctcttccgcatatgcttccacgaaagaatcccactttgtcaaagagaaatcaatgtttcgtttgcctcccaacgcgttaagattccgtctatcaccttcttgcttttcccctttcatcgctcttctagtattctggttctttcacatttctttccttctccaactatcttcatatcctatctatctcacttcatcaccttaaaggttctttacaatggccgaagaaccagaggaggtgtcttgtaccttccagggctgcagacttagcttcaagtctgccggcgagatgcaataccacaaggcgaatgcagacagacactcttactgcatgaaatgtgacctcgacttccagtctcagcaggccctccatctgcacaagattatgagcgaccgccactttgcttgccccgaatgctgtcttgagctccgcagtgaggctggtctggaagtccatatgagaaacgtgagtcgccatcctttatggcaacctccaaagaaacaaaaaaacagtactaacaaactcatcttttccagaatcaccaggaaggacgtgaagtcgcatgcatgggatgcggttgcacgtacaactccgcttctgcagtcatcaagcatatcgaagacaagggatgccccgtccttatgctgccagagaaaacccgcgatgccactagccaggaccttcccagcgcagcagcaattctgtccatgggtcgacattcgcctggaccacagtatccaccctctgaagcctctagcgaggaccaggacacggatggtggcgttccgctggatttctctacgcctcgtatggaaggaaagcgccctgctcgcgacactaactatgcaagcttttctcttgatgattggcccgagctgggcactccagcgactccagtcaaaggcaaagaaggaagtagctccactgaatcgtccggaggtgcccgcctcgatgatcttttgagttacgacagtccttccccgtctcctcgcggagctactaaccagtcgagcgaggctggatctactctggctgttcaagaagcaggcccttctcaccatactagatccactcgtggccgagctacagctcaccgcaagattcaaggtgtggaccctgagagcttctggaatcatgagaaaagtcgctactactgcaactgtggtgcgtctttcttgtacctcgccacctttgagtatcatctcacgatggaggatgaaacaatcagcgagtaagtatcttcgtttctatccgtttatcttgtgaagcaattctcactaacgatcttttttatagttgccctcgatgcttcaaacgattcaagactcttgccgcgctcgtcgctcacatggaggctcgatactccaagtgtgctttccgtgtgaccactggccagattgaacaggagctcagtgaagttactcgtggctttgccgatatctcgcggatgattggggatgatgaaacggagctgggcgagatcgatttcgatgtgagtagccagcccgagaacaatactaccggggcttcggatgcagacgccgcatctctgagtgcagatgatgtctctttgaacgcagtggccatctctttggatgcagatgacgttgcttcaaacgcagcagctgtatcttccaacgcaggggccgtttcccctaccatggaatccctagtgagtgattgggagggtcttgtcttttccgatgcacacgaagaaaatgacaaggaggacccttgaggcgaggtttgggattgagaacaggggtgggattttgaggatgagctttgaggatggtatctaggggttattcttggagggtgagcttcaagactagctgctacggttctacggattgaattttactgatatcaaggaaggatagaaggggaatctccacttttacatagtttcatagcacaaatcaccttgatcaaacttcttgcctggagtagagctagtatgcagcctctgggactcaactatatgaatcaacaatgacagtacaggtactacggaaaacaagatcagaaacgagactggatttcaatttgctcagctagaaaatggaaaataaatatgtaaaagttgagtccggactccatcttcacgcaaaggctccggcaaattgtcgagaacaagagtcataatggctaaataggcatatagagcatagaaaagcatataaagtagagcaatattacccatcgagcccggctagtccccaccctcgatatcccccgtcccaaggaatcaatcaccggacgaggcaaatacgcaaaaccatcgagcaagagcaaggtatcgagtatatcgaggggatcaagccgatagcgtgctagaacgaccacgcaactagcagcaacactcgcagcattcacagcattcgaagcagagaagaccggcgcaactagatgattgtcagtttggcttggtaagtttgtggtccggacgcatttggcttacaggccgcagcagacatcgccagtgccgccaccacgcagctccagcttcagcatgttctcctgggagttctgggaggatattagtctggggttttgtgaaggggagttgtgtcttgtatggcatacaggctgctcggttaccatggggtcggtggagggggcctttgggctgacgggctggtggttctcggtgcctgttgtggcatcgctggtggaggttggaatggactccttgaaggagaaccaggagaagagactgttggcaaacatcttaattgtgggatggagatgggagatttagagagatggtgagtggaaggggaggggaagttcaatgggggaagtaggtacctataggtaagctctggtattggatttgctaattgtatgacctcgagctgactaccaatagagtgggattgtctaccttgccaatcatgtatcaagctgaatttagatccttgttcttatgttatattcaatatttaatatttaataaacttgaagtatatgtggttatgaatattttacacagatcccggtgaatcccaagcgtagtatgtacatgtacttggtgtccttttgtatatattgtgtctttcccttctgttgtagtcagaaggagtaattcactatattcaacaaaattatatgtcaacatctatgatctatgtgaatccaaaaatagccttacgacgatcaatccgatgccaagtatcgtgccaagcccaaccgccaaccataaattttcctccaaccgcagcctccgcaatatcatcgacctcagaccaaaccaaaaatggcaaccccttcacccacagacctaaacgcctcccgcgaagcagactacaagcgcttcaagaactatgcagcctacacattcctaatcggtgcaccgatcctaatcgccctcccaccacgcaaactcgaccctctcaccgtcctagtactctgctccttcggcgcgtccgccaaccacatcgtgcacgaacgcacaggacgcagcataatcgaccggattgacgcgcgcatttccagcatgcagcgctcattctcttccctaccgagcgagcgcgcgcaggagatccaggcacgactccgggccgcgcgggatgcgcaaatccgcatcgctgagcatgaacagttgaaggcgcggattttgtcgctttcggataagcagcgccgggagccggatccggttttgatggaggagattcagaagctgaaggcgagacaggcgcaggaggaggacgttgtgcggcggctttggatgggtggggagtccgaggggtggaaggagaggagattgagggaagagcagaaggcgcttagtgaggggaagggatatggggatttgattcaggaacatatttgggatgtttggacttggggtgggaaggatgggaaggctggtgagggtgttacggatgagaatgtggctgagaagaaggattgagttcttcattctgcggtttatgtctgttttatgtgtcttgtacagcgtctctgcctctctccccaccttgatgtattatattttgccctgctttgcattgggataggtgtttggttgctttttgagttccacctgccaggaatttatcagtctgttcgtgttgggatgtccgtgtacaatacattcattcgaacaagctgcaattgtctacaatatgtatctactctagtattctagtgtatccccatcccagaatgtattagttacctgacgtcgaaggccatcgcctatctcgaaggatcttacagccagtctacggcatctacaagcttacagaaaatgaaccaagtggagaatgatagttctttatttcaaaatacatcttcgaaaaccaagagactccccacgaccatggcatcgcgagagactcctgatcggtacatgatatcccttctggaaagccatgagaccctcaacgaccatggcatcgcgagactcccaagccaaccaaatttagtacaaatcctctcatatccaataaaacaaagtatatccctcccataaacaaataaatgaaacatgaaatatatgcaaaacgcccaaaacagatggtataaatggcaagacccctcattcgagccgtgggatgaagatgagcggctggtttcttttgatgtagatgctgatgctgatgctgatgctgatgctgatgccgatgttgatgatagatgttgttggtcttcacccgacggggccatgggaaaatccggcaaactccttgttgggtgctcggtaaaaaccatggtcaggactgcactctaagtacagcttccttgatatcattcctccattgcacatgtacccattcgaatccttttcctccacgatctggccctccctgcagacggggccggtgcgccatctgcaccaggaccagacgatgtttgtgatgtgtcgtctgtcgatggagtcttccgcgccctactctgggtgggttgtcacccgtctgtgacggttcgtacccaatatgaggaacccagagatcttggggctgattcggaggtcggtgaatggtgaccgatgtgggaaagtgtgattccgttgttgatgtcgacttgttgtcttttcgtgaggcgactagagcagggttggctaagccgctgtctagtggagctcagttggggacgaagctaggatccaattcgctagctagtctgagcatgctctcggcctgttgtaaagttagagaaagtagttacattcagggtttccttgcaactttggagaactgatgactttgggatgaaaagctggagggtggaaagttgggggacggaattcggggggacggaaagcagagtgatggacatcaggttgatggaaagcatggggattgaactggaaattggaaagtgggggactaaccatttccttgattgcaacagcacccagagcgagggctttgattctctgtaaagaagttagtgcatgttgcagcccatgtgccgcttcccagagataactcactggatcagggagcactggatcgggaagagctggagcgtcgggcatctcgatgtcattctaaatccaatgttagcaatcgatcttcgacaagatggatttgaatgtatcaacttactggttcatcggatggtgcatcgtccatctgaacatcaatgtttgatgggtgaatgtcgaggttgtaattttcgttctggttgcggtaggctagacgtctccgattgccatttcgagcctggccctattatatattgttagtatcaaatcaacaatgcgtcgaggggacaatggggggagtacttacaacatttgcctgggcaggacgagagaagctcgggttgtaattcttccccttgtagttggggttgaagttctttcccttgtagttggagctccgctggttgttctcgttgccgaacccgtcgcgagaggtgtctcgctggttgttgtaatcgtgggtgccattgggattgccattgcgagggctccattggttgttggcgttgccgttgtaattgttattgcctcggttgttccaagaacctccgttgttctggtaagctcgtggcccattgggcacaggagatgggccattgccattggcattggcattgcgaggattggcattgcgagggctccattggttgttggagttggcattgccattgtggttgtagttgcctcggttgttccgagcacctccattgttctggtaagatcgtggcccgttgggcacggaagatggttggaagtgcatcttcgtggggttccgtataccaaagttatttttgtttggactaccgcagcctggtcccccggacgagtttcgtgcaagcgaggtcattcgattgaacttccaaaagccggatttaaacttgtaagatgcccgcgaacctctgtttttggcttgtttctttcccttagcgtaggcttgtttcttctcgacccagtgtggatttgtatagtggatttgtttggggaggaattggttttggtttttggttttgccttggctgggatacttcacctcaagaggccggtgactatctccaagtccgacagttaaagacaactccctgaccttggcaacttgcgacgaaggctgggcgatttgatggagtggaatatagatcttcttctttgaacgtgggagggccgagccgtgtggctggttggaggatgtggttttcggtggcctgccagcggccaagtgaggtttatatgccggatgaaagaatgtatacccaaagtggaagggtataggccccaaggaggggatgaggagcacttgcgaggcaaatgctagatgttgtgagatgatttttgattattggagtatgccgatgaccccagtgagaggtgaagaaggaaagaaacgagacgagtcggggggtgggcagaggggcttttataacactcaagctagatgtgctactaagccaatctaggaacggagcttgcttccacggtgataatatactcaattccttggattcgtagaaggtaaaaaaggcctagataaggcgagttgatatgagtaccatgatatataggaggcaggccggtatatcttgagcctagagcagagccgaactgagttaaaaccgaacaatgggccattgttaactataaaggcagacggacaaagaaccttcaggtcttcaacttcggctcgaccatttcgacagaggtctttgggacatctcatcagagctccgaagcctaggatggaatcggcctgtagttgtagagggcacatagacatagaaacacacatgtttgagtttcagtatcctgccttgtcttggaacccagacagagcaaaagctttgaagtgtcttgtgattactgctgaactcaagtcgttctgctgccggagaatagcggaggaatgatcgtgtcggagcacttaatcgaggtgcggacaacattctgtcggcgtatcacgggtcaaagagaagccaaagagaagtcaaagagatctcgtcggaacaataaactcaaatgctttcattctttgggtatttcggataatggctttcttccgagtacaaggcctttgatatgtaatggatgcccagtgcgcatatgtcatcgtgactgtacacctgggcaactcgaggatataagaaaatctatgaaagaaggaaaaatgtaaaacgatcaagagggagaactcatcaagccaattaccatataattccttggaactatgaacttgacctcggactataactcacttggacctttcaaacgaatagacaggttaggatctcaatatttctaatgggattcacgttcgaacacagttcttccgttttcactcgtgttttgttcttctgggccaagtttagggaagatggaagtatgatcaggccgatgagagactagaatcatatgctaatgagctagttatatcccatccagaattggacgttgcgcattgcagaatgttggcaacttcttgattgaaacatacgagagtagtcggccgcttatatgtctttttggtagtgttttctccccttctcggtttgaacagggatcagttagaatttctaagaatagtttcagtcacactcaatgaagcatcatggccgctttctcgaacctttagaatccgccaatagacgaagcacaagccctagagaaacaaaaggagaccagataaagaccagcatcactcatggtctccctcaaagcattcattttaaggcgatttgcgtcgtttctttttatccgcgtcatccaccaaatcaccatgtctcttgtgcccattctccagccttagccgtttcttccgaggcttgcatgcaatttgtgattcaccgtcattcgacacgagactgtcgcgcttgcgtttatccgctttggggttttctttcctaaaacgttgctcctccttgattttcagccgtcgctggacttctgctgagatatcctctgttccaagccacgtcgacgtgaactctccttcttgctcggttattggctgagaaggagattcacggtgtctcttgggggctcgttcttcttctgtggggtcaggacgggctgtgtcgttgtcccgagagattctgcgtctttttttgcgaatgttcgcctctgtgtcagtggattgtgtggggttggaggaactggaggaactggaggctgggagtgtagcgttttctaaggctgtcatgtcaatttctgtttttattgcttggtaaaggtggtgtaggttgctttcttgcgtctggggtaggagtttgataggacttactgctcatctaaagaagtgtcagtcagttatgggatcaaagaaagaaaatcgggcactactcacaatatgttttctagctatcttcagctggttcatcgccagtactgttttgttcaccattgacgagacggtctggaaaccattgacctctggagcaatctggtccttcaccatgcttagcatatcaaggtgagagcagaggaaggcctcatgacgggagaagatctggtcgcaaagaaagagccggtcagttacagtgcgcctgagaatgtccatattttcagtttgcgccttgcgcaacaaaagcgtacctctgaccaagggactggcgggtcatttgcattggacttgatctttgaattagcctttaaatgggcatgcgaatcaccgacgacttcgtcctccgctgtaggattcatggtgggcttaaagttggcagtcatggtgaagttgaagatcggcagctactccgcgccaagagttcggctttgcagatgacgcgcttccgggctttaactacacgacagagagtaggaaagagtagaagagagctattcagttgtatatctacctaggacttgttattcaatctgattctattgtctatattgttcgtttgtgtattgtccctatcccactcggtcctctgatgcgtttctcttaggaaagatgcaaaaagaagcgaaccacttgaaggtgaccacggcttcttgttattatttcaatctcattgtacattaatcgcaagctccgacgccattcatccatgctcaagacctaatcatatcaccataaacccagctattcaagaaaaataagtcatatagcggagaacgctctctcattaccaagcaccagcgtcaaagtcaaatcgggacaggtctttctgtgaatcttcgacatccttctttgctttcatgcgcatgtagaagatcggacagtcacgggatgagcagatgacctcacagtgaagactaccttggcaccgctggcactgagtccacagacgtccgaatcggacctctagatcagagaccttggtgagggtttttgtgtaaagttcaccgaggcggggacggcagttagagcagacagcaccgtccatctcttccttgctgacaagaggcttcttgcagcccatgcaggtctgggtcttcttagcgaacttcatcagtccgcccaggtttgacgccgctttggtgatagaccgtgtgtgctcgccagtgagcaactggcccgccttcttgcccaatatgggttcgaagatacggttgagtgggtttgtcagctggttgtcgaggtagtacttagtgtcaatggggatgttgttttccagaacgtagatgggatcttctgctcgttcatagcccttggaatcacccgcacccttgatcatgacgtaggccacacggtcaccaagtgttggcgcagaacctgcgtcacgcttgtgcatgcgttcagcaagttcgacgtgtgcctgcttgcctgcgtagtcctccttgcgtttcgacagcgcttttgtgatgactagtttcgacatatcgatcttgttttggagcagatctgaaatggtggatttgacgtagctagatattatgttagtttcttgatagctttattttggggatatatcaacttactcttgcgcaccatcaacatctcggtcaatcagaattttgttcagcacggtttcaatgacattttgaaccatcaggcagttatcacgccggacggtctcaataccctttgtgtccatcttgtcaggtttgtcggggtttgtccagtataatccagcgtatcgcttcttgttgatcaaaagataagggaagtatactttctcgaattcaagcttgatgggcgcaacgaatttggaagaaacaaattctgctgcttctcggccaagcttcattgcatctgctagttcagtgacgccaaatttgaccatgacggagtcggtgtcaccatagatgacttcagcatcgtgagagtaaccgttggcgatggtgtaccgtgattctacctcttgttttgtcttctcaatcatctgacggccgtaactcgtcgtactactggcaatgggaagacaaggcagtttacccactgtggcacctgtcagaccgtagacactgtttgcgctgaccttcaaagcgagttgacgaccgttcagcactgcctttttgaaagaatcggtttcggtagccaactccttcttcgcacgctttcttgccgacaacagctcttcgagaatctgggacaaaagtcctttgcgaactttggtggtgcaaaacatgtctccattgggagtgacgatgtaatcgtcatccttcttcatgttcaacttctcaatactactcttgttgagcagggtcgtgtagcaaaggttgtgtgcttgaatgattgaggggtacaatgatgcgaaatcgagggtcgcgacgggcactggatagtaccctcgcttcggctcgatgacagtggcaccttcgtagtcctgctcatcctggggcttggaattgggaataacaagttgctgctctcgagctttccggaaaagttgactgatgaacttgacttgttgtcctcgagacaaaaggaaattaaacggtacgcccgtaactcttgccatctctgtataattgaccaggcacatcaatttgtccattaatcgttgcggcagatacgcatctttcagacagtacactgccagtcgtcgtctcgaatccggggtaccgttgaacagctcagtaatcatcgtgtggtgaacgtcttccttttgctccttcaaaaactcccaggatacggaattaagggtataacttctcaactggtgatctctctgaaccaattggagaagatcaagctgaattctgccgtttgtattcgtctccttcgtgtctcgattgcccatttgcttgctcgaaaattttccactcttaacctctgtcttgaaacctttcaatctggtccaataggggaacccagtgcatttcaagtgcttggcgcgatcgagtaggtaggggaaatcgaagttggcaatgttgtatccgataataacgtcagggtccaccttttccacgaaatcgcgccaggcgtcgagcatcttctcttccttctgaaattccaggatttgggtattgacgatcagactacaggtatcgaggacaaaaacgtttctgatgaatggtttcgtctctccgtatcgagtaacaacattggcgatttggatgacggggtccacgttaggctctgggaagataccctttcgtccggcacactcgatatcaaaggagagaatgcgaagaggtgccattttagcccattccccattgggtggatgagccaccatgttgcgatagtcgacagaagcttcaatttggcagttggacaatcgttgactctgtccaagaagacgatatttcccagccatcgcctcgacccaagccattccagccagcccagtgtcaatcatgaagcgcaaaaggtattggatattgtcgaacgtgaggattccatctccacctgtaccggtccacatacccttgtagttcatgcttccactgccagtctccaacgcacctcgcaatcgagcggccaatttgggctcagtaaccgtaatcttgatataataactcttttggttcccttgaaatccgtagatgttctcgcgcattgtgagctgcacagacgagattgcagtgaagccctggcctagcttttgctctaggaaatgtttgtaagggtcgcaatcgtctttggtgaagctgacaggagcagcgatgtagaggtaatgttcaaagccggttacatgaaggcagaccgattgtcctctctatgaatattgttagatacgaaaactcagctggtagcgaatatatttacctcggtaacaccaaagagccgaatggcaggttttcccatcaggaatgcttcttccgcgtcaatctgctggaaacagatgttttccgtggcttcgtcgaattcaccaagcgggggacgctcccattgctggtctttctccgagttgttctccttcaagtcgccgatatcctgcgtcaacttttcgagcacctcctcctcgaattgacttttctgtggttgacttgagccaatctttcggcgactcatctgcgatgatggtgtgaactgtacagacggttcattgtcgagtttccgctttttgagaacgctagcagatttcaagataccgttagagttattgaccgcgtcgcccagcacccgcttctggggagggatgatagcttcaggcatgacggcaactcctagactgaggttcacggagtcacagtcaactttgtggtttgaaaacgatatgatatgagagtgggctcgtaaacttgagaatgtgttggggtaactccttgtgaaagtcgcgctgtcgcgccttcgacgtgacgtttacgcgtgggagtcacgtgtgataagataagctaaattgaaacaaagattcggggcgatttgattggtcaaaaggtccagggcatacccatttagctctagatatctttttttggcttcttataatagaagaggtaccttttaccttttattcaaattagaggtatacatatgaagagctacattgagtagataagtatggcatgccatcatataccccctcttgaggcccaccaagtccacgagtgcggaaacggatgactcgcctccctgtgcttggcatcgtatgaagtctttgcctacttctccattacgtctatttacgcattctcctgaacgtacagtttcagactctactcaaaagacctgagtctattttgccaagattcgcatgccccacgtccagagacattctagtagaacccgatggaagcagcttgagacaatcatagccccgctaggcttctgtgacatgtttacatctttttgatctcaatcccaacgtggcatctccgcccaagggatatttgatacctgtttatttctgtcttctttcacttttgcggcgtcgttcttgatcaaggagctcccatcttttcactgcggggcaacgatcagagcctccggagggcattacgatctatatcgacttgtgcgccggtctttcttctagttcatcttcttctgttcttgaaattatctgtgtaactcgcctctcattgccaatgacgccagcacagcactgattcaagtcttcattgcggtgctaattgaatgaacagtgtatcaatatgtcgatgtttcgatcagcagcagaaatatcatcagactcagattccaactcgggttcaaaagaaagtcaagttgaggaatctggaccatcaactcctcgacatgccacagagaatcaatctcgcgacctaaaaaaggacaagaccaagcaagtcccgaaagactctggttctacagatgcagactcttcgatctctttcagcgatagatcaacattaccacaagatctggctgtgaatgttgatcaacatgcaaatgttatgacagccgccctcttggaattttactgtcagagtcgggcagcagacatcctcaatgctcaacaaggctcaaataaactgttcagccgacacagtcccgaggctcagtatctcggcaagaaactctacaaattcaaatcacagttcttgtcggctcacggtatcttggccgacggcatcgacagagaggaaatggggccaagtaggcaaagttatcgggataacctcgacttgcttagtatatctgccctcgaggagatgaatttccatgaacccgatgcgcggccttccacaattggttccggcgagaacctcgccttaatcacaaagtcttcaacaaggagacccagcgttgaagacgtggagaatcctactctattccgacggaacactgaaccaaatttatcgtttaggaaacagcttcctcctcctaataaggtggattttccaaccgttcccttgaatctccccaacccttcgatttccctatttggcagttcgcccgtaggggttcctcttttccattctccaacatccccaccgtacaatcagctatcaagatattctgtcgaattccaggaactcaagatcttgggtcgcgggtccttcggcgaagtttaccacgtcacaaaccatatcgacgggcaagactacgccgtcaagaaaatcccactcagccaaaagcgacttgagcagctgcaatctgggggtcaaaatcacctcgaggttatcatgaaggaaatccgaacgcttgcccgccttgagcatacaaatattgttcgatactatggggcatgggttgagcaggcccatcactcacacctgccttcagccgaataccaccattctcacccagcatatgacaagtcgcagaatgactcgccttctccagattccccaaatgagtcaagcatggggattgtcttcggacattctgaaaattcaaatcgcgagtctcagtcaagctctctgtctgaagatcatagtttcaccgagagtatccatggctgggacagccacgcgactacctcgtcccatcagtggaagaaaggttcacgaaggggattgtatgaggaagatgatgacattgaatccatcccccgcgatgggaacacttctgttggccaaacatccactttcggggatactgacgacatctttactgatggtctgagccaagatcagtctaaacttcaagttcaaccccgctaccggcctggtcagcaaccccccgcagtcattcttcacatccaaatgtcactccaccctatttcgctcggcgcgtacctgaaccctcaagccagtccgaagtatgatgaatgttcactcgccaggcgccattgcttccacctcctgccctccctaaagctcataatggacgttgtttcgggcgttgagtacctccactcaaagggaattgtgcatcgcgacttgaagcctgcaaatatcttcctttgtgcaccagagactagcacagcagagatatgccttgcgtgcagctccaccgaaacttctcctaccaagttctgtcgtcctcgcatcggggactttggtctcgtggcagatatctcccacatcaatgaggcctcacagggcacaatgacaccataccgagaaggaccaaatatacagcgggtagtcgggaccgagttctatcgtcctccagccaatctatctgcgtcccaaaatgaccagagctcgccagtggattactttgacgaatacaaggtcgacgaaaagctcgatgtttactcgctcggcgtcattcttttcgaaactgtttatcgttttaacacaaagatggagagacaattcgtcttgagtgacttgactcgtgggtcaggccgtgatccatccgagcgcaccattttccctgcagacttcgctgccaagatcgattttggctcgatcgtgctggacgatggaatttcggtcgcggattctctcatgacatgtatcaaaagaatgttggaacccaaatcgcagcaccgatggaactgccaggatgtcaaggaacatttgcgggcgctgaagaaagccgttcgccgattcgaggaaacgcaggaataaatgcctgaaacaaagtcaaggaccaatgagcctgaattttaatatcatatacccaaacaacaatacaaatgcacaactctcctctatcaaacacacattgaagatcagcattcgggcctcggtcaagtagctctccccgcatttctcacaggccttggtcttccccgcttaaagccaccgtgtacttctagtaatcaaataatcaaaacatccacactactatctagcaatctattactaaataccatttcataatggccaaaatcctccgccccgcaacagctccgtacagcgagccccttctcccgcaactagacatccgcaacccctactatacaaacctgaaccacaacctgcgcgccaccgtgcgcgaatatatcgatatatacatcaccccctacgccgcagagtgggaagaagcaggccaagtccccgaagccgtacgccggcactattgcaagctgggctatagcatcgtgcaccccctcacgagcgaggaggactcagccggcctctctctgcctgggaatgtgccgcgcgagaagtgggatacgtggtgctcacttattgtaacggacgagctcacgcgcgttggatatgtcggtgtgatttgggggcttggtggtggtaatgggattggatgtccgcctgttgcgcgttttgggaatgatgagcagaggaagaggtggcttcctggtgttgcgaggggggatattcgattttgtttggggattaccgagccggatggtatgtggatgtttacttcagaggtataactatcttcaggatatgggttgctgactttgtttactttttgcagcgggctctgatgttgccaatatccagactacagcccagcgggatggcaatcactatattgtgaatggggcgaagaaatggattaccaatggtatctgggctgactattgcactgctgctgttaggaccggtggtcctggaaggtctggtatcagcttgcttgttattcccttggctactgccggagtgactcgcaggcgtatgcataactcgggtgtgaatgccagtggtgggtgcttctttctcaatatgacctgtgaagaaagacatcgccaatcaacacaactataggctcaacctttatcgagtttgaagatgtgcgtgttcctgtcgaaaacctcatcggccaagagaacaaaggatttccccttatcatgtcgagtgagttgccttaccaagggtctgaattggctgctaatattttcttcagacttcaacccagagcgccttactctggcgtgtgcgtcattgcgactctcccgagtttgtgccgaagatgcctacaactacgccatccaacgcgagacctttggatccccactgattgaaaagcaagcaattcaatccaagatcttcaaattcggcctcatgattgagccagcctatgccttcatggaacagctcgtgaacatccttgaacttaccaaagaccgtccttccgacgacgtcaacattggtggtatgactgccttgcttaaagtcatgtcgaccagggctctggagaagagtgttcgagaagcacagcagattatgggaggtgcgggctataacaaggctggcaaaggtgctagaatcgagcagattagtcgtgatgctcgggttcatgtagtcggcggcggaagtgaggagattatggcgggactggcgctgagggaggagacaaaggctattcgcactcggagaaaggcacttgagaagagacagtctaaagtatgaaagaaaatacgaagtcactcatgggtgaatgggcttgcacgagtttgtagtttatacctaacctagaattcatgcagtgaatagggataatgataatgatgactatataaggatagaacacaagcaggcattctatcaaccttattagacagtataaggctttgcattgataccgaagatcagatgaggcctctcagcagcaatcttcagaacagtctgcgcgaagaccgagttcgcccatgcgaaccaaggacgggtatagtcctttatgttggcaacattgatagattcgtgaacaagcccaagcaagctagaattacgaacgagattgaggtttccaatgatctcagcgtcgtcgtcagaggtcatagcttgaacaagtagagacatgggccaggcgtgctctagaccgatatgtggaccagcaatgccgtggaactgtgtacccaccagataatatggattggaagccttgtcggtgatcattttgcgtgtattcttgtagacggggtctgatttgtccacaaagccgaggtagggcaacgagagcagtgaggggatgttggcatcgtccatcagaatacgcgacccatacccgtcaacttcgaatgcgtagacatctccatatttggggtgtttaacaatgccgtgatcgcgaactgccttggctagcttgataccgcgttcctgcaggtccgcaacgagacttggggacccaccggctgccttgatgactttcgctgtcttttggagctgtacggacatcatagcgttgggcggaatgaagaatcccaggatcgtagcgtcatcactggggcggaatgcgctgcgaattaggccagtctcgctatttagcgggttgccaacaccagctaggttgagggtctcagtgccaatggtagtctctcgttgaaacgtgtactgattttggacgaactggccctgagtattgaatgtgggctgagactccgcgtcgatggtctctagcacagtttgcaccgctttataccagcggtcggtcaagaacgcaattgaaccagtattttcgtggaactcagtgcctagctgtaggaaatgggccagagagtcaagttcatacttgcactcaaatacaaaagaactgtcatatgcaggatgcacagtgtctttttggctactggcttctggcttgatgccgctgagagccggtggctggaaagcattgcaatagggcgactggatgacaaactcggactgagtgttgattgcacctagtatcagcgagtaaagactctcgtccttagcagctagtttctggtaatttgtgagctggttggttgagtcacgcagccactcggcgttgatatcgcccgtcacgacgaaggtctgcactccggtccattgcgcgccggatcgcttggcattggtgccggatgatgtcgatccgtttgtatgccaacgaattgtagtgtctaaggtatttggaaatgcatttcggaatagctgggcaagatctttatcgactaggcgcgaggtgatatcgtcaatgaccttctccaccgcgggcgatgaaaatgtccgacatggttccgcaggtcgctgaaagggaagattcaagggaccaccactatagggagcgctgtaatattgaagttttgtttagcgaatacttgacatatctcaatgggggtattgacactcactgcggtgttgatgcataggaggtgtagtctgggcaggcacgtcgcaagatggctgggtcgtctctgtctgggagagcgctggcctgaaggcccagcagagcgattgcgagtgccgtaggaatattcatggcgcaaatgtcaaataggaggaaaattatggacagacttgcactgctataaggaagaaggccggggttaataagaggggatgtgtgtcgatctcaaccggacagggatacattccactacacacatacaacttctccgtggctgtttaggagtacattttgacatataatatagaaaccttgaggtgattcgctcggagaactactaagtaccgtgcgaaattgaggtgacatcgctctacgcacgatgacacccttccccgcataaagtgcggagaagatcgacgtcgcggcatttccttgttgggtttatatacttgacatgagctggacgtatgctttagtattagatatctatgctctcagaaatgattgggcacctcaataatactacagaaatcacttcttcccaaagaacgacatgatattaccctgccccgcagctttgccagccttccctttgggaacattgaccgcaggcttcttcttaggcaccggctcatcctcggagaaagactcccacgtcgcctcttcccgggtaactgcaacaaattagtatacgacaaacgaaggggcctcagcgggttgcacggacctaagtatccttcttcatccttgaccgtcttcttcttcattacttgccgcttgcctcgccgccgcccgccctgtatagtcacttcttctttaagttcagctggcttggatggtggcggttgctcaacaggcgtgggctcccgtggctcctcatcggcatcaggcatttcctcatctggatccatgtcagttcaatatttcctcaaggtgcaatttgagatgaggacataccggcagcctcgtcatcatcatcgtccatcatcttcttgagcttttcctcgcgctctttcctgttttcgcgggttcctgctgctactttatcggtggaatcagggaacaattcttctgcttcttcttcagaggctacaaaatgttagctaatgcatcaatctaagtggggcgaactaaccatcttctgcaagaggtgtggcctgtagtcaaagttaatagaacaagatcagtaagagaaaaaaagataatattaatagaatgcagcacgggtgagggcacgaaccggttctgcgggggctggcgtctttgtctttggctttgccttggcgaaagaactgaaaatattgcctttctgcttggccggcgcagctttacccgaaggcttcgaggatgactgggagttggtagcagagggtggctcagacatcggtttgtccaacttagtagcttccgctttcgctggagatgcttcttgctgcagtggccgtttagagggtaccattgactcagtcgaaggcttcaatgccttgccagccggcgccttcgcagatggggctgcaggtggtggtggtgggtgcgcgccagtcctccgctggaagatagataaacattagatcatgatagacccgtcgaagtaatgaacgacctaccctgacatctcgattttgaatcataccccattgcttgccacactccaatggatcctcctgctcgtgtgtcctcgcaatctcccgactggcatcaaccaacacattcaaatccgggagagttgtagcctcaagactgtagacatgaattgtagatatcgactggaatgttgctttcgcatctggtcgattccttcagtaatcagttcatcaccgagacgaatctgcgtaccttcaaggtcttcctcgcgtgctaatataatagaggtagtgcgaattgagtctgaggcatcctcgtccggcaacgagccggtcgagtagggactactctgcatcatttcatcttcatcgtccgcatggccgttcgtaggggtcggttcgggcgctttctggataccggagatgacgtaggttgcgtggacggtttttggcttcttcgcgttctcattgcgatggaattcaaacaggatactatgcaacagagtatcaatatcagctccaaatccaatacccattgttgcgaacgtagaacatactgtttggcccgatcggcgtgtactttcaacgcgcggctcaataagcgatacgtgacctaattctagtaagctcctgcttgtctgaagagtgtgagaaaatcttacaagacgccgctcattgagcacattttcagccagatacaacttcgaatccatagttgctttgctgttgaagtgcaagttgctccgacgcgtgctcaaccacttaacgcgtatcagtcagcgggtcttggcatttgcggtctcctcaggcgacttactacccacttacaattctcctttttcggttgccttcaccgggtgagtccggttagaatttctacagaaaagagctccggagctcagggcttgggcctcaattcaatggatcagtcgttcgagctacccgactccaccgattggttggaaacgccactttcactacttgcgccgttcgaatcctcattacgatgtcaagtctgcaaagacttcttcgataaccctgttattacttcctgcagtcatacattctgctcgttatgtattcgccgttgcctcagcaccgaaggcaagtgtccggcgtgtcggagctccgaccaagagctcaaactgcgtcgcaattgggcaatgcaggaactcgtcgacgcgttcaaattggcacggcctagtgttctcgatcttgcgaggagggaaaatgtgcgcctggctagagaaaaggaagatatagaggagccaacccaaaagaagcggaaggtcaatcgggtggaagaggaggaggtacaggtcccagaaataaattcgcaaggccgacggactcgctcccaagtgtccataaatagctccgcacaagagcgaacggttccccgggtcgtgcctgagatcatcgaggacagtcaggacgatgaagaatatttgcctggtatgacacttttatcatataaaagcctgacccgtctaatcccctcgcagaaaatgggttggttgcttgcccaatatgctttcgcaaaatgaaggaagaggcagtgtttccacatctgaacatacaccaacaggaagaagaagcgcctaaggaaacccctacaaaggcaggatctttcgggtatgttaattctattgcatgtctagaacatggcgctaattggagaaaaattgcattacaggtcatcaaaaggcatatcccaaagaggccttaccctccccagcaagcagcccgaacggcttccggctataaactactccatattaaaggataactcattgcggaaaaagctccgggatctcgggatcccagactgggggcaaaaacagctgttgcagagacgtcataccgagtggatgaacttgtggaatgcaaactgcgactccaaacaccccaaatctaagcggatattgctccaggaactggacatttgggaacgcacacagggtgggcatgcgacggcgccgtcacgattcacaacctccaataatgtgatgcgcaaggacttcgataccaatgagtggtcaagcaaccacgacgatgactttaagcgtttgatagcaaatgcgcgtaaaaagagtgaggcccaagtacgatcgactatccctggcgcatctccgtcttcatctagacagaaggaatcacaaccccagcaggatactggattaccggtgaatggtgcacacgttgagttcagcgcagacaccgatcctaattttgtcattaacctatctgggtgatctcaaaagaagccacattgaactcgaattgagaagcacccagaagagtaaactattcattcacgtaaggcagatatctctccaacaatttggagaatctcagtttgcttgcatcgggcgatcctcgacggacatgttagagagcctgtcaataatgttatctgccagtgccgagtccgcatcttcggccgcacgtgctcggcgggaagcctcatcggaggcctgcttgacactgtccagttcggcaagtctgctctcgacgagtgcctctctctcgctcgtctccattgccgcaagctcatcatcaatctctccctcgtcaatgactggcccagcctcgttcatgacgcttccgacctcatccaccttggccatctcttcccgcaattcttcaacaatgtcctcaaccctctcggcaccaccgatctgagtatgtagactgcgaagcacaccagtgcttgacttcatgatccgcaccatctccacctggtctgcagcttgctcgatctttgaataaacctcatcaagctgtatgagagtggtagttctgtcctggaggttcttttcagccattttcctggaacgcacggcggacagcgctgatatgcggttcttgttcgccaaggccgtcttcgcagacgcggtcagctcagcgatctttgctttcaggcttgtgacctgtttcaacatagtcaactgcaaggtcttgatggatgcaatagttgtgtcctgttgggtgatttccgccgattcatctgccgatttgaacttaattgtctagccatcaatcagtcaatatctgggtatcctggccatattatatagtccaacttaccttaccatcataggcaatagcactgctatcgcgggacaaataaagcaacaggacatcaaaatctgcgtctgataattccgtagcttcgttcagtatggccgcaaactcttcaacaaacatttccctagagtaaataaggtcaagcttggatgatttgccgcctgtggctttcttaaccgctaggtctgccgcttcctgtaggttctctatcaagaccaactcctgcacctgcagcttcggtgctgaatcgctatcggaacccacaacgaagcctttgagctgtcgagctccccagctcataacattccaaggactcagaaccccgggatcaattagcttccactgacttttcttttgcagaagcccagcagttgtcttgtaaattggtaatggaatcattgaattcttgcgcactgcctcatcctgtaaacctcattagttagcttaacagctctgtcatccaaggggaagataatagacctacaaatacagtacccagagctgcgggtctcccccactccggactctctaaatctcggagcagcgattcatccgttcgcagaattagatggtctgtcttctttcgtttcaagggtgctccgctctcagctgatatggtcgagccggaacgtacccgcacaccgcgtgacgaggtataaccgcgctttgcggctcggttgagtgcatgttcccatgcggcgacgttaacagcgtagccgtcggggtttgttttcttctgaggtgtgaaatcagagtatagggagggtaaacggttcctaaggacataacatcgaggtaagcatggtatcctctcttctgtttaggactcggtttttaccttcggaatgcttcctcatgagtgaggatatatttcagtagttcgctcatcatgcaagggtatgttgaggaggaatgatatgacccgctgtaagcagataataataggccaagttgtctcggagacaaagcagatagcgcaacagctttatcgataagccccacgtgacgcgtccgaatgtgatgcttagcagttctacgacaatcaaaggatgcctaaatttatgtttggacaagcttgtattctatggctatatgctatggtgaggtattaaggctgtaatgagtctaagctcgttcaaagtcatcattgggtgttccctcagagtccagaggcccctgcgtcgtgttaaaggctccggtatctagctgcacaggatgcccgactagagaccggcgatgatggcgcatgtcgagcttctcgctggtctcttcggtgtccaatggatcctcactagccggtgcatctcgggcatcgaatcccctcgattcaagatattcaaccttgacagcatggcgcagattgtcaacgaagctctgcatctcaggcatatggaacaccccgtcagcctgcaagacgtcagcatagagaagctcagcttcttccagacaggccgaggctagggttggatgtccagatttgagccattgatcagcagcaaggatgctccacatgccggctttccggcgacgtccaccccatttcgctgcaccaactggtgtcttggaagcatagcaagctgctaccctttcagtgtatagaatatgacccactgagcccacaagaccaaaatccatgacccgcatggcccatttggctgcgctctcggtagctgacccgccacgagacttgaggagttcaaccgctagggataaacaacgcagtgcgtgtggcgcatctgaacaacgtgtgagataggagtaacaagcagtctcgaacatttggtcgacgctctcaagcttgattttggctgatgtggccaatggatttaaaagcatgctaacagcgcacatttcgtgcgcaccagcgtgatacttccaggctttgtcgttaccataatccgatcgaatcatatcgtatgtagacgcagctaacttccaatcgcggagcatgaacgcgaagtccgccatctttcgcaagagagcctccggggagtctggactataagaatgttgtgctggatcgtagttcccgccgttgcccccagacgagcctccgatacttgaacgtgagcttgaaccgaagccagcccaccgccgagacatcgacataaatctgccacttataccacgcctccgagatgcaacctggtcgttccagacagctactttattttccatgaagggaatgacggactgcaccacgagttctcggatgaatgccctaatcgcagtagcatcggagccaaaaagatatggcgtgccatcagtgccgagatcaaccaaggcttctagcaggaagttagtttacgtctgtttgtgtagtagcgaacacttgcctgcttcacctgcccccgacagatactccgacggcgagagccattcgcaccggggaacttgcatgctatcatcgtctgtcaccacacactggctgctccgaagtcttaaaagatggcaatgtagcccaaagtgccgcttcatctgatcataaagcttgatagattctgtgatatcgtctcgttcttcgtcatgaactaaaacgtaataacgaagatactcctggttgatccagtcgggtagctgtttgtctccagtggtaccatcagcatagagctgcctgagtgactccaaaggagctgggttgcgcgagctgatggctattacattggctactgggtggccaaatgtctcgtggggagctgtaggtgccgaacacagcagttgctgcaaaaacgacttgcataatggggttgttgcagggaatcccagaacatcctttgtccgtaccgacgcaccaagcatgtcatctgaagagtctaactgcttggtcaacaactcttcaatctgcgccaggggcccagagtctcgactagccgcggccctaccgatcgctctgaaatcaacaaaggacactccaaaatcctcccatgcacgactcgagcctatactatcccggatcaccacctttccggaaactgtttctccaaagggccgcaccaactcccaaaatccccctttgaatcccttgctcctcaccaaattatcggtatcctccgaagcatggactgcgatcgtcggtgagaatgaccggataattaatgatcttatatcttctgaaccatcggactttccatcgaaagcagaaccgattgatgaccttgctaactgtggggtggaagatcttcgagagcgcgagtgcgacgagccagatcgtattggtaagtcggcgatcgtgtttgaaagagctgtcggcgaggagacggtttgggattctgatagttccgcatctaaagattgatttgtttcatgttccccatggtatcgtgatggtgatgtggatgcgactcgcgcaacgccaggggagaaggacggcggaggtttaaccggagcagcatctccgggcgatgtcatgggcggacacctgctgctttttgcagatttaaagcgagtgcagttgatcgacaggccccatcgactggtagatgagattggaggagttgtaatagagcgagtaggtgactgcctctatgtatgtatcacatgatctgtaactagagataggcagagtcagcgctccggtcaccactgagggaaggggattttcaccgctctgccggttgaccgccctcaaaggcaggagattaatttatcattggggagtttatcttttagaaatacaagcacaaccacgctctcgtggattttcttgtcagaaagaagtaattcttcataatcaatttcttttctgggagagaattaggattttctagcaagacggtggatacctacaatttgttaacaattaagtcacttttatcacatcaactactttatcgtcaagaactgctcccaaaactgctctatataagtaagcggacggattttcgtcaccgcctcgtcggttgaccggttttgtcattccttccatcagtcaacatcatcagtctttctctgtaggaaaagggatactcatacagctgcattattccatcacgttcatcaaaaatctacaggaggagtcttccccacgagtggcgtgaggcagattgcggtctgacaacaaccacctctagttgactgacaaaatccactggcaacatggagaaggtagataactaccagccaatcagtcggaacgataacactgtccgtattctacgagccttcgacaatcaccttccggcagatggcagagccaatttcatccgccatctccagtccctacaaacaaaccaagacatccatgatcatgccgagtccttggtaaacggcctgcttgcgccaatgaagacgcttcgctcgacacccacaatttccccacgtgctggaatggaagactcgatcgagaatattgcttcgcagtcgagtggaccgttagtaagagaaactcgacttaaggcagagtgcctgaagcgtgacggcaacagatgtgttgtcactaagcgtgtcgatttccattttctctcaaaaagtgacaccactactccgggagccatcacagaatgcgcccatattattcctttctcattggcaacatggcgagatgagcgcgaatcacacgctaaaaacatcatatggacaaaccttatccgacatttcccagcactcgaaacgagaatcagcttttcccgggataatatcaatgataccatgaatgctatgacaatgacccgtgatcttcatttctactttggccatttttattttgcgtttgaggagactcaagtgcccaacaaatacagactacaagtataccggccaaatgcattttctccccctctccctcggacagtcaaatttgtgtctcgtgacccacggtatgctcttccaagtcccgaactcctcaaggttcatgcagctgtcgcccgtattttccatgcatctggagcagcggaccatatcgacaaaggattccgagatctaggagagactagtgttttagcaaaagacggcagtaccgatgtttcagctatgttggctgttacctcacttggtgttctcggctcacgcactgggaatatccagcagactccagcgaccttctcgggtcccaaagctcaaagtgtttcaaaggttcacagtgggttgattgaagaagagggtactgatgaggaatacaccgtgtggtactgaatgtttcttgaggtcactttgaaggcaagaattgtcggccgcttatgcggccttnnnnnnnnnnnnnnnnnnnnnnnnnnnnnnnnnnnnnnnnnnnnnnnnnnnnnnnnnnnnnnnnnnnnnnnnnnnnnnnnnnnnnnnnnnnnnnnnnnnnnnnnnnnnnnnnnnnnnnnnnntatgcggccttgccaggtattttcttgatagtatttcttagcgtctaggcatacatatctatatcctacaacaacaaaattcgatatggtgtactagcggttcaagactgcgttggaagtccgcttcaaggtgttgttggggagaaagccaagtcgacggattcgggccgacaagcaccaagcaatggaatagagcgacagcagccgtgaacaagctaagcactaaatcattctaaaaaggctaaggatcgtcttgtcgattgtaaatgtaatacagagtactctcggtagaagctgatagtcgatctccaagtggtgatgcaaaccacgtgagggccatgcttatcgacaatcaaaccgagttagtttctcggagcatcaacctggctctgtccaatgcagttgcactcttttgtgtgtgtgtttaaagcttctggtatttcttcagttaaagctccatttgcccgcactctagcgagaagagctggtcaaatacgcccgtttcaacaacatctacccctccgaacctactctgcatctgtaccccgtcgcatttccatgcgcaaccccgaatcggacccggacttctcagaacgagtcagcaagagacgacgcatttcttccccgacgcgggaaggctcatacgcaaccatgagctccgccatgcctaccatcgagctcactccacttgaaagcaccttacgaaccctactcctcgatgtcgcacaatacatcaccgagcagaaaattgccaatggaggcagcactgcgaaagatcactccgagactgtcttgcgcttcacgggcgggtgggtcagggacaagctgcttggagtcgagagccatgatatcgacgtgggtattagcaacatgacaggataccagtttggtatggccctgaaagactacctggatgttccggagaatcttgaaatatacaagaaaggcctaccgaatggggaaatgcacgacgccattgtgagccttcacaaaatcgaggccaacccagagaagtcgaagcacctcgaaaccgtcacaaccaagatcttcggcctggatattgatttggtcaatctacggaaggaaacatacacagatgacagtcgaaatcctcagatggagtttggcaccgctgtcgaagacgctttgagacgcgatgcaactatcaatgcgcttttctacaatctaaatgagtcacggctagaggatctcaccgagagaggactgaacgacatgaagaaaaagattatccgatgcccaatggaaccatatcaaaccttcaaagatgacccactgcgtgtgcttcggttgatccgctttgcgagcagactgggataccaaatcgagcccgaaaccgaagccgctatgcagattgaagacatccgcgaggcattgaaactcaaaatcagtaaagagcgagtgggaaccgagctagaaaagatgttgcgtggtgagtcattgcacgtgtccggtattctatatctctaacaagtcgtatctcatatcttaggtcccgaccctcgcggtgcattgcagttcatcgatcgactccatctattcaccactatcttcgctaatcatcaggacgaagttaaggctgatacatcgacatggccttttgcctacaatactttggcgcgattgctgcatccagaggttggtgacagcgatgaacttcaggcagttaccaagcgcattcgtgagatcttattccgcgataaaactaccatatactacgcctggatgattgccacctttgctccctggacttcaattcctggccggaccgggaaaggatccaagcccttgcccccgcgagcggttgaggttggaagagatggccttcgcagtgacaacaagacgctcaatgcgctccgtgctgctgctctgcattacaaggaaacaattgcgacaaaaaccgcacttctcacggacaagatgagtggaacaccggcagaaatccgacagtgcattggattgcaaatacggtcgtggaataaggactggaagctttgcattctcctggctattctgcaagaaaacatggcgctccgtgactttgcagaaggtaagatccgttcccttgatgataacattccaattcttacaatgtgcagtggcccgtgaatacgaccagttccttgcgtacattgtagaaaacgatctggagggtgtttgtgacctcaagcccattgtaaatggtgacgaaattatgaaaagtctagggtctaaaaagggaccttggatgtccaaggcagtcagcatggcccttgaatggcaacttcttcatcctgatattatcgacaaggaaacggtgctggaagagatcgcgggtcgacgagcagaattcgaatgacgtccgtagatcccgatgacaaataaaatcccattccacggcggggacaactcaaactacttgaacttcaattgtttacaactcttctctttcattgtaaatatcccagaaatggataaactgcgcaaagaagcccgtgaggctctcgtgctgaaccctggcaaaatgccagtcggtttcttccccgccgttgcggctgcgtccaaaagtgatttgggtcaattatggcaagacatcgctgcttacgatcactcgacgcatttaaatgtacgtttttgtggatttgatgaagaaaaatgaactgattctccagatctgcgagagccttgttacggcgaccagctatatcgactactgggatgggatgctgccaaatgaccaaggcccgcgacccttgaaaccagctgaagccaaagccgtgaacaacctattcgactgggccagtgctgctgctctgccttcgtcaaattttgctgtcgattttgacgagactgccgagatctcggacggtaagttcccttataaacataaacatgtggaacttttactaattgtgccacacagatattatcaaggctcagaatgagagtcgttttagatctgagctcgctctggagctgattttggttttaaacaagcccatggcaggattgccaaatggcaggccagacaatgtggcggacattctcctcgcgggggcatgttttgtcaaccagcaaaacccatgggtcacatcagagagctacaatgcgacgtcgatgctcatgaacgtgtgggtccaagacactcatcttgccaatacattctggcccgctatagacttcatcctcaaggagaggattaggcctctttttgcgaagacaaaaaactccgccatcaccagtgccggccgcaagaacttccatcctcaaactctacctcgcttcggttcaagcgatctggacgcatcggcaaagccatggaagaccactgatgtctacgtcgaatctgtactgtcgtggatcctctcacagtaccgacccgaggacaagacacagttcgaaacgcacttccagcttttcgtacccactatcctagcaatgattgacgacaacaatatcccattcaaaacaaaaggctgtgccctactcattcagctgctgctgccaatccaagaaagcggctcggacattctccgacggacaaacctcacctccgtcttcgaagacgccgtcacgccgtgccttctatctttaccatccatcacacccgaagatagatccttagagctactaggagaagcatacccagccctcctctccaccctcaaaaccgcctgtaaaggccccagccaatccgaacaggataaagaagcctacactaccagcctcgccaaaatcctccgatcaaacctcatctcctccttccatcatgtcagctccggaactccagcctccttcccgcatccccgtctctcaaccttcctcctacaaaagataacgatcatcgtcaacgagctgggaatccacactacaaagtacctccaagaaatcatcccagtcctccacacaacactttcaaacccattcggaacagcacaccctccgttgctgttagctgctgtaacagctacacaggcggtgatcaagaacgcacacccacgtatttggcgctggcgcggtgagatcttgagcgggctaacttcgtgctggctccatattgctgaggatagcagggattccgtggctgagctggctaagctgaagcgggagttgcggcagacgcttcaagttttgaaggttgttttgctgaatcctgttaccattgcaggtgatgccccagagccggaacagctgcaggtgaagcaaagtgtggagaaggagttccaggaacttgttgatgcagatgcagagcttaagggtctatttgcttgagatttactagcaaattctgtctgaagggttatttttaaacaacaattatgacaatctcaattgaagatatctgttaggttgaagtccggacttgctcttgagatatgggtagtagtcaataaccacgatccatagaagcttcaataaagtaaaataatatgtaacgagggtatcaatttgcaggatactgtacgccaaaacaaaaagaaaaacagatactcaacttcgcatcatgggtcaacccgctgcttgaaaagactcttcccgcgcaaccactggcggtatcgtttatatctcttcttttcgtagtcctcacccacgacagtaataccgtcctcggagacatccaagaactcagcataagccagcatgtttaccccagccctcgcctccagcgcagattcctcgacattgcacttgttcgcgtactctaggagatcgaggttgtagccgtggtcttgcagcgatgaggctgtcatttcatctgcggatgtgacgacaagtgggaccttgagtgggtgattgatgtaccgctcgtattcttctgcctcggcactggtaacagagggactgagcgagtcgctgactagctggccgagggtccactgagcgatctccgctttgctgggggtggcgtgggcgtttggtgggtcaatgggtggaatgcgggatacatgagggattttgaaagcgggctctttgatgatgcccgtgagagggggctgtttctcggatgagggtaattgttgagcccacgtatgtgtggaatcaggtattggcaccgtgcttgatgaagcgctactgcggggggtggatggctcttgaatcttgacgctacgctgtggtaggcgctcgcgttggatttgctctggggggatgcggggcacgaagggactgagatcgggaactgggtgccctgggcggactgggggtaggtagcgggacgtggagttcattttgcaggagaagactttggagagggaagacatagcgagtggtcggtagtattccatccagaagtcatcgaaatgtgagagtggcgctttaggatggaatgggaggggtggaaatttcctggcctctaaattttctggtgtgtaccaggagatatagtttggtttctttctgtcaaagtaggctttgggatcggtatggtggagataatagtccgtaggaagatcccaaagcatcggaataccctgcgcgaatgtgtaatttccaagaaagaggttatatgcctcttggcgctgagcatcaaggaaagagttgttgtaataccgcttgaagctttctaccatatctcgagaatggctgctccattgattaatcttgcggtaggtagccatggtgttcaccaaatgcgatccgccgtactggatagcgatagtgtctccatggtcatgccacatgttcgtgaagagattgacagcatcagtatcatattctacagtggtgtcatctatgacaccaagcgcatggagctgatagccaagtgccctcttgccaatgacaaactgcgcagcatttgttcggtcgaggcaatcaatgcagttggtccttgcgacaccattctgaagctgcaagccggattctgcatcatccccattcttgaaaaagccaattttgggaaggatgtcgcccgcaatagcttctaacgtcttaataacatcctgatcccggctttttgcagcacggctcatatcccacgcctcgtaaatgagcttcttgtcctcaggaagaaactggttcaagtaagtcaccgcgttagtgaactctttgaggagtattgactctcttggagttcgttcgcgggacttaaccaggttcagaacatagattggagcaccatatcttcgaaatagatcgtcgaaatgcaatgccgcagccgagtagaatggatccacgagattaagctcaatatccggtttcggtgatacgcccgtgttttcttgagtccagtgaagaggaatgctcccacgatgttggacatatgaagtatagtgagggtttgcataaagttttgggccagcagaatggaacgacgttgttgtctgttcacatacaatctgctcggtctccacatcgttggccacgtatcccaggtcatttgcgcctcgtttgagaaagcgcgctccagcaaagaatcgggatcgacgtgcgataattgtaatgtagaccactcgtccatagacactcatctttgactgatccacatatccatgaatgataggtagacaccactcatagggattcttgaggacctcagtagccggggaaagaagatgatggttccaaataaacatggaatggtaatcatgcgaagatggttgtggatgaccatcctggtgggcttcgcgatcccggcagatattatgctggagtgtgcgagtgatgtcgtaggaatagctgaaatagaaagaccgcgacaagtctaaattattcaaaatcgcaatatatcgtgcctcctccgaatgtttctcggccttaaggtgtgaaggttccgaggtggtcaatgggatcagttcggtttcgtcgatctgatagacattgtggccacccagcatggcaacctgggtcctcttggtaacgagtagcatatagtatgcacctgtgaatcggatgaatccaagcaatgcccatgcactgcacttctggttaaatccgccagagctcctgttgccgtcgtcgatcgcatccagcaactgaaccatctcccttttgttgtacaccatgtcatcttcggtaatacttaactcgccggaatccgaggtccgatcgatcttcagaatccgaaaacgagtttccgcaagattgaacccgaccatatagaatcgagtcgcggtttcatatagcgtaaatttgtgcaagcggttgatcccttcatcctctaagttgtccgaagccgtccggtgtttctgcgcaaaagtcgttgaagcctgtcgctcaaaggaagttgctacctgtggctcctcgtcttccacatccccttcctcttcctcctcaatccgagctccgggcggtggattgtacggtaatgggaattctgacccgactgaggcgtcatcaattattccagtatcatcggtgcgctctatttgcgacgagggtttgatgctcgtcgtttgggtcgaggctggtccccctgtggtatcttgtttcgccaaattcgggtcggatggaatctcatcgtggaaaggtgcttcctgggacactagtccaatgagagaaacatcatcaaagctctccatagctcaagggctcgaatggactcaaaattgtgctggaaaagctgcatacatatctaaatgatttctagtcaaaggcgatgttcggaagttcaaagaggaggtccccacacatgacgtcgtagtaaatagcggccaattggtcacaaaggcattctagggctgtatttctattttggtacttattccagacgtttggtttctttctaggtgtctttactagatatgctcttattagtagacaaatgtgaatgttcgctgggcactgattaggtatgccataccaaagtagcatatgaagagccgttaccgatagtacctgaaaaggagtaggatttcttttgttgcatcatatatacaattcgagcaacgatataccctcttttaaattccaatccaacgcagtctggtgtacaaaatgcgatttacaattaatgtatcgagaactgggactacgcgatccctcaaaccaacactctcctcaatccatcagtacctccaagcactctcctccctgttacaggacacctccccttgccactctcccatttaccagatcgcttttgggggctttcttcagagtcatctccactagggctcttctttgtctcttcatcgtcacctgtgatctcctcttcccacggtgcgccagcaccctcgccggtcatgaaatccagttggcgctggtgctcaccgttcagccagtggaagatgcacacataacagaacacgtaccccgtctggcaagcagtcgggttaacgagcggacccatgcagacaggacaagtatttgcgctggaaggatcagccggaggcaaagacacagtgtagatgggaagataagaggtcgctgaaataggcggttggtggcgacgaggaggcttgagtgctggtttgagatcgccggcagcgctcttcttctcctgctcgacctgctttttcgccttctctttctcgtcttggattgacgatttccgtcgttccgcaggagaagtcaaacctgccacaatgggggcaggcagatccaggacctcagttgccttccgggctagctggcgagagaagtcgcttgcatgccaccattctaggaacttgagggcgaagattgacgcaggaaggaagtagcgcagcgaggtcaagagctgagtatggaggttctggggactaaggagaccaagaagacctccgccgggtcgctgagatcggccggtactggggccaggcttaggatctagcactgcggcgatggcgcggtggtctgcgatgccgaggcggcggatacgcgttccgataagccataggaacggggaggagtattttgtattgtcgaagaggtaggctaggttgaacgccagaacagagaaatagtatgccgcattcacggatgggtagacattgcgcaggaaccacttgtagtagaagaagatgcgttggcgtagcgacgggttgaccggcagatcgtcgctaggattatatcgtggaccgctgctggcaaccagagatgcatgtggtgcggcatgaatgtcgtatccttcgtctaacttgcgctttaggtaaggtattccaaccatgacgatcaggttcctccagatgtccgtcgagtgtagcttcagggcctcgcgcacagggcctgcggcgccaacctgggcgcgcgggatctcgccattcttggtgcggagaacgcgctcacgtttcaaggaatagaagttttctgtgaaggagccgccgaacgttcgcaggtagtaacgttcgactattaatgaaaggagggcatagatttcgtcatatgagttgaggatccggaggagatagcgcgggtggcggtgtgttgcgactgcgagaagataacgcaaagatggaggaagaagatccgagagctgttgctcagcgaggagttctgttgtcgagcacgaacctagcgttagcgcttctaatcaatacgcggggaagcatcaatcgacttaccgaagagcgacggcttgtgctcgtcgaactcctgttgaagactaggaaggtactccatcgtcaagagtgccagtcatccttatcacggtggtatttgagggtgtttgaagagagaaagaggaagagtcgccggaaccaatgatcatatgccgaggctcaacttatccgagctgactacgtcgctccgggcgggctgaagatccatacattcagaggtatttacaacaacttcaatatgtaacatgagatacgcatggaatattgtacactggagaacatatgctagattattttacaaagttgtttcctcgtcgttcaattttcccgagcaagtgcctcctggcactcagtccagagcggcatgtagaagctctgagacgcttcaccatctcgattctggagtgtcgggtctgctaccagaatacaatgcatgatggctgtcacgatcgggccttgtaacacaatagcaggggactcttgattcatcaatgctacccctgtcgacagacactcgcgcgctcgcacttcctcacccaactcagcatgcaacttgaacagctgcacataatcctcttgtgtgcgattagcgcctttcaagggaaactggcgccacagacgccaaaacccgtcgtaatccccgcattgaaataatgtcaccataagctgacgcgcatctactacgtcaaatggaatgttggccgccgcgagtatcttggacagtcgagacaagatctgtttctgagactcggtttgttgaacaacagacgaacttggaaaactctcttctgggcacaattcgttcgggctcgaaggtgctagattgggtgcacagactgcttgatagaggatattgaaaattttcatgttcaaaatcggcacaccacggagggccaagcgatccagaactaacaaagcaagctccatgtcaccctctgaagaatgagtcctagactgttcggtgataacacccgctgttctcggtgttagaagggcagaaacaacatcgaatccaagctcatccggaatttcatacccgtcgcgaagaaaatcagagattgtgctaaaaagtgcatccttggtgtaagctgggtgttgccgagacacagcaatggaaaacagtttcaatcgaaaggtggctttttcctgtgcagaaaaccgcgcggcgtggttggtatagaagagccgtaggaaaagagtggactggcgatcatttgggccgcttccaagctcatttcgtgcactatcggctggaagttcagcgagaatctgaagcaaagatgccggtgtcaattgagatgcaactgctgctgcgccggctggaatagtggaagacgaagttcccatgcccgggaaaccagcttctaaaccaggctcggtggagttcatggcagatagtgcgagtctacgcatggtatgaaagcctctcctttggccaggaatggaaccaaatccatcggacatagacctggggggcgcagcaccagtcttagatgaatcctctgtgctgtctcggatgttcttgcgtccttcacgggctaaagtagtctcccagaggccgtcaaggtcaacctcagcccgcttctcctcggtaaagatctggacaaccacgctagtaccaaggtcaagattaccaaatccctcaattccaacatcactcaactgggttgtagtatcgcctttgtccaccatacccgcatttacacaaatccatcctgtggtgattccatcatccttttcgtcgatcatagtgcctgctgcactggcagcgcgcgctcgcttggctttacggcggagtttaattttcaactcgttgcgtccaagtaagccgtcggcgtagggagacaatttgtattggcttctcagccagcgacagagacgatccgcagacacgttcaaatgcttcacactgcgagcagttccaatgatcatgatgacattggcaccgagagctgcagggatttcgaggccgcgcaggtcaaaaagcttgaggccatccaaacccaagtccttatacgtatattccaatagagtcgagagcatctccggtgaaccttctgggattttagggagatgagcttcggccaacgggcgctctttaatgattggcgccccttcctgcagataccaggggacgtgctgtgatgaagctggcgcatttgcttccgagtgtggtggtggctcatctacttcagatagaagagtatcaagctgattcgaagttggagggcgatcagatcgcagcaaggttacagcggagaaggctctagggttggagatcgaacgggaggaaagaggagaggatcgtggcattgggatgccggagacagaaacaaaggaccgcagcacttcatgccgacaagtctgacatgcagcccctcgtaaaagagctctgctcatagtgatggttatattggaagaaagaaatgcggagcttgagttcttccaacaggtccagttcttgatttgctcccagtgatatcagataacgggagcaaacactgcaaacagctgagtcatcaagaaaaaaaagattcgggtggggggcaattatcacaaatcgacgaggctgtgaatcttcaataccctggtgatttttcattcttgggttctgatttccgactatactcatcaagatgtcgatggatctggatgcccccgtctattttgcgcagcaggagaaagtcgcagcgacgtgagttcttatcgcaactttgtttctacctattactccccaccttctcaaatactgatacttcatttccctcagaattctctgctgcaactgtggtgctgccattgatggaacactctcagctggagccctatgttcggattgcattcgtcttactgtcgatgttgctggaggtgtatgtattaccccgtttgtgggctcaaaatcaaaagaagccttcttacactataatgtattccaactaacatggactttaggtgcaacgcgaagcggtgattcactgttgcagagattgcgaacggtggctgcagccccccaacagctgggtcgtcgcagctctcgagtcgaaggaactactcgccatttgtctacgcaagctccgtggtttgaacaaagtccgaatcatcgatgccagtttcatttggacagagcctcattcgaaaagattgaagctgaagatcaccatacaaagtaggtatccaccaattcagccaactgagcacatctagcccgcgggatcgaagctaacaacctacaagcggaggccttccaaggcactatcatacagcaacaatttgaggttgaatatgttgttgccaatcagcagtgttcagggtatgtccagttataaaccccccataacggttaatatactgacaccacctttttttagctgccagcaaagttacacacacaacacttggggtgcaagtgtgcagatacgacagaaggttcctcacaagcggacctttttgtacctggaacagttgattctcaagcacaatgcccataaggatactatcaacatcaaggaagtgaacgagggtcttgatttttacttctcaaagaggaatgaggccgagcgcatgctttccttcttagagtctgtggtgccttgcaagacaacacgatcgcacgaactcgtctccatggatattcatacgagtaagagtgtctacaagcactcgtggtcgtaagttttcccagatccaactcctcgcgcacacctatctaacaaccgcatttaaaacagcgtaactattgttcctatttgcaaggatgatctggttgctctaccgattaagctggcccgctcattgtctgatataagccctcttgctatctgccaccgagtcggcacttctattaaccttatggacccttgcactctccggacaaccgatcttcctactagcacttactggcgccaacccttcccgaatcttgcagataccaccgagcttaaggaattcatcgttttggacattgaatccaccggtcactctaatggtcgttaccttctgtccgaggccaccgttgctcgtgcttcggatcttggatctaacgatatcacctatttcacacggacccacctcggtggtatcttacacgtgggtgattccgtcctcggctaccacttgacgggaacccagttcaacaacgatcaattcgaagcaattgagaatagccaccagtacagctcaacaatcccagatgtggttcttatcaagaagcactacgtccgcagcaagaaatccaaggctcgcacctggcgcttgaagcgcatggctcgcgagcacgaggaggaggcgactgccgctgtagtcaatgttcctacaaacaagcgccaagagcaggagcaggctaggatggaacaagattatgaaatgttcttgcgtgacgtcgaggaggatcaggagttgcgtcaaactcttgatctgtacaagaaccgccagtaccaggtcagggcagaccaaatggatgaggatggtgatgatgacatggatgaggagggacacgctgtgccgaaaatcaacatggatgagctgcttgatgactttgatgagttgaacatggaggacaattagtagcaatctggattttatcatggatgatcatgggactggttggcgttcgtgttttagggttttttcaatcatcaagaaaagttgttttttttttcgaattgatgcatacaatgtacagcatttacttctggaacagatcaattcagatgaaaatggatcaaggaaagagagacgagagtatgtagattttatattgtaggaggcagtttctaagattgtaaggctacactttacaatagtactacggaatggcaatattcgatcataacatctcagtgaatgatatagaaatccgggctgtagtagatcaaatagacaggccagaggccataaaagccaataaaaacaagacgaaatgttccccgtgaaatcctacttagaagatcttcccaagtacccgcttcgcgtcctcggccatagcaccatccttcgatccctttacaacctcattctgctggaaatggaaccgccttctcgtgggctgcttgtccttcttaggctgcagcagttccttatccccatcgccagccgcctcaccagccgcctccaaccgcctcttcatcttctcctcattctttttcgccatgccatcagcaatgcgaccactctcaacacccgcaatgaacattttagcttccttagattcgcgagcgtcggcaatcttcctcttgctttccctttcagatctctctcgttgtacggattgcataagatcctcccaggagtaccgtgagagatatttgatgttccacacatcatcgtgataccctatagatcgcagcactggtcagtattcatcacttatataagggcgaaaatgccagtaaactcacagctcgacttcaaaccacccacgatagtcgcattcaaggtctccgcgcagatcttggccgtctttttggagtcaaactcgatccacccttcagtgtagagctttctcttattcgagcggttacgatggccggctgcggaggggagaagaggggctaggaagatctttgtgatccctccgaaccctctcttctctagcattgctttcaaggcgaagggtttgaggtacggcgggagagaagagaagtatataacgcctgagcgctttttcttgggttctttgccgttcgcgagtttcgacagcttggcgagcttgccctttgctttgagcgacttggctgatttggtgctgggttgtgctgggtcttttggacttgtgccaccgtcttcattgtggttatcttcgtcttcgttctcggcatctttgtcgttttcctcctcgtcctcgtcttcgtcagactcctgcgagaaatcttgcgtggttgtcgtccgccgccgcttcacggcccgtcctttgctctccaccacattggcttcagagtcgtagccgcggtcgctgccgctggcctcatcatcatcggccgcgatatctagaaaatcattatgtttgcgagtcgtcattttgtggaatccgactagggttgacagacttggttatgggtggcggaagtctgcaactttttttatgcgggtggtctgtgccctcggagtcaagccccggggccgttccaaggctaaatctactaatcagccacacatgagccacatggcaaagtcaaagagtccagcttaagaagggtttaagatgaaagaaattcttgaaattttgtaccggtatctcgaagaagccattcgggctctgtatgctgaaaagaaccctcccaatgtatccacgaaacgccacagagaaccagtataagagcccgcatgatatatgcaaacaaagggcaaaaaattgaatatgtaacaagtctaactaatgcccaacgatcccttggctcgctcataaacgtagaagctcactgcaaccatcggaatgaccttggcgtatccgatagtcagtccaacccagaagcctctgaaccctctctcgagccagattgcgcgggcagtttcagctattccaagtcgtcggccatcaccaactgcaccactgacttgcatccgccgacggaggacctccaatgggtatgatgaagtctgcgaaaccagaccagccacagcaccagacagaagctcaaacgtggtattgagctgcggtcgtttgggtcgatccgcggaatgtgctaactcttctggtcgtctgagggtgtagcgcgccacactggggagacggaacaagtcacccactgtgtcgtgcgtgaggaaagacattccggcgtaggggagcatcccgaggatagtcggggagaagccgcggtagaaattggcaatgccgctgcgcgggaaaactttcgaagcggccgctgaagcgctttcggcagcagcaacggaagaagactcggctgccgcagcagagtgggttggtgagggtctaacacgctcgtggtagatttgccgccataccttgaccaagcctaagtgtttcgactgtctggtttcgtatgccattcgcacgcgcatcaattctaatgggtatgtgaaacatacagaggtgacaccggccaagctgccggagatcaatcgccggaacggggtctcgaattcgctggaaggaataatgaccgcgcgaatctgctcgtatgcaaggaactttatagcggcgtaggggaaaattcgaaggagggtcactgagtggcccttgtacaggccccgggtaccttcattgcgtttgatatctcgaatcgctgaggccaggccagtccagctgcccgtatatttggcgaattgggggttcgacgactggaataggatcttcacgcggtctaggggcgctaccacggtcttagcctgtaatgtccggcgcattaattagtataaagctcgtaatgacctgtcgcccaggaaacttaccgcacaccctgccagccctcccgcaattccactcctcatcacataatcaaagctacgcttttcaatcttgtttttgccgctttctggtatgcccatgtcggcggtactatttgacttaaatgatttcgtagcgccgccgacaggcggcgatgccgaatgtgcgacgctcatcggagcgaactgcggagtagagtctgggattttgggaggatcgtaggcatagtccaaatgaccagtcgacatggaataggaagaggaaaaggaaagatgaagttgtaaaagagcaaccgaggctggtaggagggggaagaatatccggggcgccctcgtgatcagtgtcggcgatagtgagatttctggggtaccggatgatcttctggacactgcaactgtacacgcaggtctaagagttggcggatagcactctaagcttgagcggagtttcgaggaatataatgacagtgtaatggcaaaagatgaaagaataatagcgttcggtgtatatttccactgacgtatttacgaggttcattgtcgttacgaacattctgacgtgccgataccagcggctccccgcgaataaccggcgggttacggtactaatacggcccgcaaaatcaacgagtcccgagatgccggtttgtcatcgtgttttgcatccactaggcccaattaggacatggaaccgatatctatcggggaagaatagttacttgttctatgttattgcattgcttctaagctatttgactttcttccccaaaaaaatgctagtgaaaagagttgaactccccatctccatgcagctcgaaatttatacgaaatacaagaatatcgtggtcgcgtgatattgtagaattaaccctctagaggcatcaacccttgcgctgagagcgtgttcgagtcaaaggcttagcctgcttagcctgtttggctaccttggtcgctcgggcatcatccgaaacccgcttgcgcttagctggcctgccaggatcaacatgaagatgcccattctcggacaacgcgatcgtgtttctccagcgcaggcagcgaagcccactctcgcttacatccagataggtcttggtccgggtggtcacgcgcttggctgggatatcctccgactcggctctatcaggcatatcggctaggtacgccttgcgattcttcatgtacttgccgatgtactcttgctggacgagcagctccttaagcaacttggactcccggttgccgcgcgagtccagccactcaacgagctgttcaattgcctcggggtcctcgtagtagccccattcacgagcattccacacatgtgttgccccttcttcgtgctttttgcgctctgcgggggtggtttggaaatgcttctggtactgcttccgctgttcgtcggtaacgtcgatgaagccggcgcgctccatctcatccgggccttgcacccacagacgaccattggcgtagcatgcctcggctgttgagctttccggcataccctcgtagggcatcgcattgcgctcaaaccaccagtagcgattgcagaagcgatccattccaaggcatcgcgtccgggggcagtcggtctcccgaaggctgttctccacagtctcgatctgctcctggagcttctctatattggccttctgctcgtcgatcttcttcaagactcgctggtattgtttggaccccttgggctgcttcgccaacatctcctttcgctccttttccaattcttgtttccgtttacgctcgagggcccgatcaattcctccgcgtaatgagcgtggtcgagggatatcctcgtcttctgtgtccccgaccatttcagaatccccctctagtcgagagtcatccaagccgtctagttcgggcaccggcgtaggtgacttcccagccttttcaagctcgggttggacggccttgcgctcctggtgcagctgacggagctcgatgagactggaagatgatgttagcggttgagatggcaatggtcaaggattgacttaccctgccttgcgcgccttctgatactcaattttctccttgcgcaactctgtcatctgattgctgcactcttctagataatttcggatggccctagtctccaagctcaacatacaaatcatctggagcgccttagtacgcaaattgatgtcaagtgtttgatactgctcctgcgcggtgtcctgtgtaggctcgcgatcgagaggcgccagatgcttaaggatggtgttgcagacttgctccaagcggggacgaacagatagctggtgcagaagtccaaccatcaccaactgccacccaccgttgcggaaatcgcgtttgcgaagacgatcaatccacccgtatgtctcaaacatatcgccggcgcgatgaatctgtgtcttctcgggttcatgttcgttaatctgtgctttgatgacgactgcctcttccttggccaggcttcctctagtggtcatcctcctaggcttcggctgcagctcgggagactcttcctcggcttcttccttttcctcgtcctcttctgattcatcagattcatcggcagggaagtctgggagtgagatctgaactgcaccatcatcgtttgatgaattgacgagtttcttgagaacggcacaatgcacttcaacgaaaagctcgcagtccacctcatctgatgagaaccgcatagcttgaataaaatcgtcaaaggtgaaagaatccagttcaaatacttcgcagtagacattgagtgtgtcccaagtctccaatagcagccccaccgtttccggctctagatcaccgggcagaaggttctctgtgccgtcatcttcagactcacctacagtcataaacttcagggctggtcgatgtttcttttcggaattcggagcaaggtctagatcttcgataggatacttgattggtggcggggttggtgctcttggctcattcttaatcagcactggtgggagtccagccagcttcctatcgccaaccagtggtggtttggaagggcgcaacgggttggaaggcagaaggaatgatgggttaccattcagcgaccgctgatactcttggtactgcgcctccctcgattttgccatgtcctgtgcagacagtttcgacttcgggcccttgactgcgggttttagctcgggcagctgctgagaagagaagaaaccaaagaagccatcttggtccgctttcttcatcgccttcttctctgccaccttcgcaccatactgcaggtgcttaggcacctcaatcgggatcttgtatgtctctgcgacggatggcttgaccaaccagggggcacctgtccacgactctctggtgacattgtttttgatgaacccgcggagcatcagtttagtgaaagcctttcggtcgcgtgtgatgtggtcctgatccagcagagcctcttcgttttgtcgatctaggatcttgaccagatacctagcaaaagccggtgttttaatagttccatcggcatataactgctctgcgaagttggccttatctctgatggtaccatgaagccgactactatcctcaagcaaaatgagaacggcttcgcctgggtagaagtctgatttgaattcctaggtttgttagatcagtcgttaatatgtgacgggtattatctcacttcatagatttcatccactaagaagagtgccgttagcttgattcggactaagaaagatcagaatagcatacccaggctgtccaccctcgaaactatagagaactgaattctacgcagaatgggttctctcagggcatcggggaaactgttgttgacttcacgcgattcctctgtctagtcgagggttagcatgtgtccatcactaggtatccatgtgataatatacctcactgcggagcgcctcaaaaaaggtcaagcccgaatggcctgtgatctcgcagatgaatcggcgttgtttgtagaagtccattcggtgaaggtaaggctcgtagctagtgaagacctcattggtctctgggataacccagacctggaagggagaaagagtcagcgagaagctctggagtatggataatagaatacacacctcggagctatcatcttcaatgacagtttgtgggaggtattgaaccggtttgcgtttgaataacacctgtccatgcaattgtgtaagcctctttgtctccgcggcatcgaccactttcctcttggcgcctccgcagccattccatcggataaggtaattgcataccatgatgctttaaattaaatgtgcacgcgccagtcggccaagagctaccgtaaacagaatcgagaatcgaacatgaacggggctaaaccaaacgcgatcttggttagcgagtgaagcttgtcggtcgagtgtgcgaaggtagaggccgtgtcggccacgcaatcggcggagttaacgggagttgcgatatagattgcagatactccagtcgctctgcaccgttgtgtagaaaatgggcagtggaggggttggtgggaatcgtcgtgatcaggcgtggtcgcagatcaagaacacgcgaacagtggaatagcgatgccttgggaattcatgcggacttaccggagtagaacgcgtcttgtactgaagttgcgaaccaagcgatttggatagggatgaactggtggaatctcaaaagggggagggaggctgtgaatatttcaaggtgtagggaaccagaaagaagaaaggtagacaaaaaggacggagcggtagatcattgcaggaccgcgaatcagcggtggacgctgattggtggagaggaggagcaagcgggagccaaagcccagcagaaaaaccgcacctgggctttcctcgggaccctcgactctccctcctcccctcgtcatctccgactgtcaattctctcttcctttcttccccaactctgcctgtatttaccctcattcgactcgtctggtccaggagatttcatctacaacctgctcgtttcaacattctcgaatctttctattctttaacccgattatcaattcccagtccctattctcggtcacctcaccgggctaagatcgggacaatcaattcgaactaacgggaccatgtcactaccagctttgtttgtatttttagcatgaaacaccaacctttcagttggattctctttggctttaaatgctgaagtcttatttgttcatacccctaggcatctacctaggtagtcgtatttcatgcttaaattagaactagatctatttaataactatatgtgactgaaatgcaaatagtggagctttacatacatactctatatcatgtactgtctgctaaatatacatcatctttatgactctaaggcaagcagctatggttggcatgtaggtttgatacacctccttcagccacggtgtcacaagcgcattgatcacccagatatctattgttggataagagatactctatatatttgcttattagagacaataagcctctctttttcatgtcatcataccgagacttgtgattgtttagttatcgcgcggctagtcgtgaatcacaaacatgcgatatgtgcccaggtatagtcgtccctcctatttataatttactactttaagaacgggttgcatatgagatctattaaaaagcagcctaaaataaccgattaattactagtagaagaagtgaaagtacatagacaaaaggtatgatcggaaaatgacttccaccacctgtggaaatatataggtctcgtaaatatgcattttcacactagacaatcaaccaagctagtatctaagccaaaaatgtacggaaatacctatgtgtctacacaaacatggctagcaaatccctagactagaagagagatcctcccccatgtttctatctgacctgcatttgactgcaggccaaccatggatgaacagagactaactagattgggcttagtgagaaaatagactccgtgatccgtgggtctgatccacgtggaagcaaacaatgcaaacattctactcctatatcgaatccgagtaaatcccgaagtcaccacaaataaccacaagcagtgtgtagttcatagttgccagctgaaatataaaagggtcttttgcagctaattattatcaatctaagaggtaaaataaaccaccatgaacccaacccagcttccgaccacgccgagggcacaataactgctcatgaacattaatggcaggaactctagccggtcccatccgaatatcaattggtgccccagcgagcagtagataatcagaggaatagagatggtcaagtagagcagcgaaagccggtcgaataggaaaattcggggccgctcggggacaggtgcgactcggtcgaagacgaaaaggaacagcaccaaccacaggaccgtataaatagtcttgagggggaagtcggatgctgtaaacagcagcggaaagagcgaaacatggcccgcaaccgccagaggtcggaaggcgctgaagtagcgacggtccttgagggcgatgagactgaatgggatgataatgaggagaatagctttctcatgtacatgccatccaaagaggaatgatgcgtagccacagagggtgatcgcaccgacaaaggtatcccaacagcctgggttgaaccagaccttgacgagaggaacctatgcaattgtgagagaaggccaaagggacaggaccagggacacataccagttggaacaagaaggtcaatatgaaggtgtactcctttgtaatctccggaaggacagcaaaagaggtgtctcccaccagtcctcgtgtgacactattcagggcactagtgttcacaggcagccctagccgtggagcaactgtagattttcatataagctcatatgtcgtgtgcgccgaaagagatagaggctacttacgggaaatcaatgctcgatcagcgaaggagtacatcgcccagatattcggtgcccagtacgcgtgacacagtcctctcgaaaacggaaacagcctatccttgagctgaagcaattgcccccattgtgcaaatggcccaaaggcaattgcaaagacacccaccacaccaactccaagtttgaaaatattaccgaatcggggccggaaaaccgatttgagactaaggcaataggtgcgcagtagatagacgaagtaggcgagggcaaggtataggtatatgtgcttcatgcatagcagcacagcaaagaggataccgctgtagagaagagtcgattgcttgcgagccaggacgattgataggatcagaattccatacatgaacccattgtattggaagtggatatgatcaatgatgaggagaccgggggatagtaggatagagagactggctacatgcgcagcctgcctgtttggcaaaggaaccgatttgacgaatctatcgaactgcagtcagaattatgttgcatcatcagaaaaaaaaaagccaaaaaaagggtcagggtcgacgactgccataccgactaagcgcatagacaagaaccaactcagtcaaaatcacggttgatctttggaagtagacggtctgccaggaatcatagccaagattcttcacaatcaacatcgcagggtctgcgtatacagcagcctgtgacatcagccactcgaaggctgcaaagaacggtgggtaatcaagtgtccattccgaggatttctaaacccgaagtcaacatcccatgcccagaatcatgcgcccgaccgaacatacctcatagtaccactcttggatagggagagaatgagtgatggcgagccaattgcgatggacctcaaaatcggtcgatttgctgcaacacaaagaaaagcatgttagcaaagctcatatagtaacctcaatgttgtattcccagtccctttaagtcccccttgcagattctttatagtgattgtttgatatctttccacctctccttccgatcttttttgctccggcgaaacgagcgggacggactcactatgcggggaagagcagcaccttgaaagcagctgcaacgatggcgcaatgcgccaatgaagggtataggtcagccattggagctcctgcgcatgatggtgcagcgatgttgaaagccgggaagacgcgagatgggagaatgcgcaaatcggtgaagtgagaagcttcctccgcacgttattttgaggccacgtgatcagatgcggagatcggaggtcaaattaggagcgaaacagctgggcagaaggacagataagtcaatacaacacatacaacgctcaaaggaaacactgtctccgtatggacttcacagacgtcggaatccgccacacgcttctcaacagtgtacagctccatcactttatcgatttctcaccgtcggccgctgttattgcaaaggaggcccgtctctgcgttattgccattgttgtcggttggatcaccacaagtgttgtctccaacctttgcaatcggaagtgtaactgtgactcaatccatagcaagcgctgatagctgctgcgcagagcttccacgaatccatatcaacttcaagcttcaccaaccacacaacatgatgagaacattagcttccctggcattgcttgctgtaggggccacagctcaaattattgagagctcaagcttcggcactggccaaacgttagtataatgtccacgctcagtctttaggttatggttatctgaccttagaccaggatatcaccaaaccaagactctatccccggatgggcaattggaggagagggccatgaaccgcacgtcgtgagtcagcctataacaactgttggagaattgctctaacagctatatagctatcagacaagctcatcttaacgccaccgtaccctggaaacacaaggggatcagcttgggcacaaagtccgtaagtgaaaggcttcgaaccgtgatattggacaccagatactaacatgagtatagagtctctcagtcggaatggtcagcagagctccaattccgagcaagcggaccggaacgagcgggtggaatcctgcagttatggtataccaaggatggccagtcccgtattggtacctcgagcatctatactgtcggccaattcgacggatttgctttagtaatcgatacacatggtggaagagtgcgtattaaccctgtcgcgtattgtcgtgccgtattgatcattcgttactaacctctcctatagggtggtagtgtccgtgggttcctgaacgacggtaccatcgattacaaaagccacaacagcccagacaccttagcctttggccactgcgactactcctaccgtaacttaggccgtccatcaattgtcaaactcaagcacaccagctccatctttgaagtcaccgttgacgacaagctttgcttctcaactgacaaggtatgtatacatcatgtccccatgccgcagccattgtaaatatactaacctgagtaggtcgccctgcccgctgggaacactttcggcatcacagcagccacccccgaaaacccagactcatttgagatcttcaagttcatcctcgagtccgccgcaggccaaggctcgacaattccctccaaccaaggcagcaccccccagcagccaatccccgatcaaattcctaaccagcccgcccaacccatcatcaactccggtacagaagccaccatgaacggcttagctgcccagatcgccgacgtcagcggtcgcatccagcttgcgggcaaggccaccaacaccatcctccaggagctgaagaaccaggcccagaaggccgaccagcgccacgcagagattctccagaagtccctggctcaggaccgccagctcgcccagttcgactcccgactcacgcgggtcgagcagctgctccaggccctccagaccgacctccagagcaaggactacagtggacgcttcaaccagctccacgagacgctgcgctcctcccacctcagcttgagcgagaacctgcagggtcacctgcggagtggtaagttcacttgcttcgttcagacgatatattagttcactctgctaattgcttttctctcatctcatagtcattacggcctctagcccacgcatgggcttcttcatcttcttgctaatcgcgttccaggtgatcctcgcgatctcctacgtcatctacaagcgtcgccgggccaacatgcctaagaagttcctttaagcgcctcatcctgtctaaccccccacccaccctgtgccatctgaatctgtgtcgtcttgagttattgtgtgatggggagtggggggtgtattcatagtattcgcaagtgtgctctgcccggaggcaaccgggatttattcttacgggggaagttatgtagagtacgaatatcattacgttgatgaaaattctctcagagtaattacatttacaagtaagagaaaagtgagatggcaaatattcatttggcctttggcccatgctatcgtacactttctccgagctacccggccacgcaaattcttttttttcagaaaaaaaaaaagccaagcaagataaaaacaacattgaaagaaaaaaacagaaacgtggccaggcagctcggagaaacagattcgagaaaattgacgatcgccttttcggcgaccgggaaaatggaaaaaaaaaacaaatccatgacaattcaaaacgccgggtcctttgatgcgcgcattgaattaaattagagccgggaggctcgctcacttggacttggtgtattgacgcttttgcgcccgctctccggctgatccatggtcatcagcgcgagatcgcttgttccgattgaacacagggatccgggggagaagctcggagtccgaatggtgggactcggcatccgaagatgcgttgggagggtgagaggtgccgaggggaggagaggtgggagcatgagaagagcccagggtagactcctcgtcaatgcgagacagaggcttctgagcaacgggcgaggcaggccccgcagcttcggggatgtgaccttcgccgacagcaggaggctggcttgtagccatgccgaggagagcagtggcagcgtcaaattcttcagtggaaacaggagcgccagcaatcatgttgttaacagcgtgagaaacattctgggtgaactccgcgggaagaccgttctgtgcgatgttgttggtgatcccagcgttttcagcacggttgaggtaatcgctggtgagttgcttggtcaactccaagcactttcgctcgacaattcgggcatactccttttcacgttcgtgatgatcttccttgacagcagtgatgaagttcaaaacgacatcgcctccgaggaaacgagctcttttatctctccagtcttcgtcaaacaaactctgatttgggtcgtcaggaagcatgatgtcacaatcaatgtacgccatgttcttggttcggcgaacacggcgcgtacgctcgttgctgccattaatctccttggtggcaatcatatcgtcaggagtgacatggttaggacacatccacccgaccttggggttagggggatgtgcgcggggaggatcaagacaatccagatggaagcggcaaggacagtagtcgcaagtaataatgggatgtataccttgggatgtaaaaccacacttggaacaacggatgcagtctcccttgttgtcgtattctcggagaagcatgggattcgcgtaaatggtagggccgtcttgcttcggtgctttagtcagccgcggcaggtggggcgcggccttgtagtagcgttgatgcttcaaattccgggcatagtcgccatcaaacacaattccttcatccactccatggaaatgctccttgatatcctgaggaggttggaactctgtcttcttgtagtgtttggagtgtgcaatcaaggtcgagaagctgttgcgaatggagcacttggggcaatgccactctccctgcggaggattcttgggatccaagggaggatccaagcattcgaagtggtatgagttgatgcatgtgtcgcagcagagcaaatcgccaccttttccacattggtggcagtcgtcgctgttctcggggggttcactgtaaggtgtcatattagcatagaactagccgagtcacaccaagaaatcacatacatagaattcggcatctggcgtgcttcgtggccgccagaccagtcattgaatcggaccgagtaagcagaattcgaaagtgaagaaagacttgagactgtggtatcaacagacagcgaccgtgcacgctgtgggacctcagggcccttggccttttccctctgacgtcgcgagacgggcttcccagtcttgcgagcgacagccgaagcaccatctgaatagacagagggagccgcgggctccggaccctttacgagaggtatatcgaggatggaacccggaacagggagagaacgcgaacgattgaacgcgtcgatgtccccatcgatacccgcatcaatgttttccatgtcgtagggatgctgaatggcatctggtggaccgatctgagttcggattgcactgtactggacaacggcttccgagtaagactctgcttcgagacgagcacgcacagcccgcatcttttcctcgtgatcaggatccatttcccactggcgcttacgcttgtaagcattctcgttgacgcggcatggcttcttgggcctcttgagcggagcggtattcgatttgccgctcaggaagttttcctcaacccgaggaccacttgtgtcgcgataaatgtcagagaccttgaagctaggctctgcaccaacagaattggcagctggctggcttgattcgctgcaggaaggaatatcggctgcattggccgtagagcgaacgtatttctgataccacctttgggcttctatcagagaattgttgaggatcgtttggagagcaagttgcagctgtttgtctcctccgtcattttcggagaggttggcaatcaaagagagtttgaattcatcatccatggcattggaccagaagtaaagaaggccaacgacacaccactcgttgtcgttctcgattgagctgatgatggcgaacttcatgacgccccgtagtttgacaagatcatatttgtcggaggggcgcaaaggaagagacatcagcacggcgaggtacttgtgggtgatgtccgcgctcgggagggtaggagaggccgcatcggctggggtggtggtagagctgcgaatagactcatcggccacggtctcggccccagtcgaggttgaggcaagtgccgcttcttcggcgatttcaacatgacccttgtcagtcggcgggctctcaaccccgctaacgggggaaaggcgctcagcttcgtcgcgcgggacgttggtcggcacggtcgcgacgctgtgggcccgttcagacggaggagccacgccagcagctcggtactccacgggcgatgggtattccccgatcggtttcattgtccgatactgggtggtgggcttcgaagtgcccgggggcttcttctgaagcttccgtcgttgcgcgggtttggaagagccctgacggcgttcggactgagtggaccccgtaggggcaggcggaaggggcctggtagggttagtgccacgcgctccatgccctaacttcctggggtcaacgtactgggcagcagcagcatctttcttttccttcgatgccttgtcggcttcgcctatttgaataagttagtttttgctctcatctggaggtgagtaaaaaaaatgtggggtaatctctcagtttcacctgaaagatgcaacatctcgttctccctcatctcagaagtgatcagtgaccagctcatggagatagacagagcaagtgtcattcacatgaaagtgagaaaagggcaatgatgttttcggtcatataaatggctggacttatgaggagggagagtatgttgtctcatccactccagaaccaagtgacagagcaccccgtctcagaagtgactgggccaatgacaagacaatttatgactcgaggcaatggcatggaaaggccactcatctttggtcaagaaatgtgcaggtcgagaggcagatgaggtgttgtatctcagtcacaacgggagcagagacatggtgcatgagacagggtaatgggatagggaagcatgatacagaggagcatagcatgacacgaagtgatctttcagcttgtgggagaccgcgaaatccgcttttcagacgtgactggatttcaggggaggggactaggatagacggagaaatatcacttactcttcttgctgagaagacgctttgagacgcgtcgcatggtagcacgcacggtatccatttttaacgatgaaagtaacgaaatggattgaacgtggggaagaagagagaagaaaggaagaagaagatgggaggttggagggattaaatactctgcgagaattgggggccttccttttgagtcggggctattgagagtgcaaacaggaacaataggatagacagtccaggtgacatgtcatgtcacgtcttgacctcgataccctattcttccaggatgcctacagagaacaatagcttttatattgatctattgatccattgatctattgagtttgcctgtgtataaaactccaatggaagcattggctctctattgtccctaagctgtgtagacaatctgccaggcacccatgcaaatagacaggctctggattgaccacagaaggtgggtacatgtctcacgaggaaatgaacctaggatatgatatactcttcagatacgctaagccgtggtttggtctctagggattcagtagtttcagcagtcgacaggaatgaggcagagatcctgattatattgctgcaccaagactctacacagactgccaagttgtggcagaatggtcccctgttattgctagcaagtagaaaacacctacataggtagcttaggtgtcctaccattccataattcgaaagaaagccacggaagactcgcctaccggtattaacatcgcccttttatcgaatagtcgacgatgaagtgacgtgtacctggtttcaatcttgcctcgaacaaattacacattgagattcgacatgacatgaaatacgaaagtaatagagaactacaatagctactgtctcaatagaatgtcttcaaatagatttacagtacacacgagtacagactggcaacgtcttgatttggtccatggagtctgctccaattgctacaagacagacaggcctccgaggaaaagcgcaagaagaagatattccagcaccaagctcgtccataaagtatataccgaggtttccaaaaatgggttggcattgccagccctgtcgcgtgtcattggaaaaatcaagtatttctcttttgttttttggatagatttcgtatgacctgcagtgaggctcgtcattggatatcttttttgcattcagattggacaaatagtcctacactatatccaagtgtattgcatgaagatgatgaccaggggaggttgttgagagcgttgactcatatttactcgtcaccgccggtggtcttggtcttcttcttgctcttgttcttcttgttgccggtagagcgggcaaggggctgctcgagaatcttgaggatctcctcatcctcgagcttcttgtcagacttgatctgctcgagatcgacgggcttgggagcggcgagcttggtgagaccgttcttggtgatggctgtgagtggggttagcttatgggtccaaatcatcttcacgcaatttcaacggtacttaccaacggtggtcagcagacgagagacgggggaaccgtcagcctcgccagcaggctcgtactggcgcaggacaccgccacgaacacactcaacaacaccaaccttggcagccttctcgtcatcaagctgacgcaagctgaaggggaaagtaccgaacttcttgacaacctcagacagagtctggcgggagctggggcgcttcaggccgtaagtggtggtggtacggcggtgcagggtaggacggtgctcgaggttcttgaccttgccggatcccagactgaggccaacctcaacaccccaaacttcgccgacctcggggacaccgtcaccgcggacaccgttaccgggggagagaatgatcttcttatcgccctcaatctcgttgcggccgaacatccagctcgtggtgttctcgacgacattgcagtcgtaggtcttggcgatcttctcgagcagagaagacatgtaggcctgagtaggggccttctgagccgcggccttcttcttctcctcatcggtaccctgagccaaaagaccctggggaatcatgaggcgcaggagaacctcgttggcgtagtgagtagcgataatgagatcagcctcacggccggttacgggctccttgggggagtccttcttgggaacgacaactgtgtcgcaaacgatggttccgaatccatcgatctgagcaccaagctgaatcttgacgacctcgccggccttcagggtaatctcagcctcggcggcatcggacaccagaggggtgtagggagtcacataggagctaggggagacagtcgtggggtgagagatacctaagtttatatgttacggtaagttcatgtggtttgtctgccactcacggggttgagagtggggttgactaacccttgacaatcttcttgcccttgtagaccttggcgatttcctcctcaagaagcttgtcacccttctggcagatctcgacgatcttctctccctccaagcaaagagctacgtagatattagatcacaatgtgagacaataggaagttcttgcgcaacataccgataacagcgtcaaggacgttgtgagaaatttgcgcagcggtcttgtacttggtcaaggtatcggggttgttgagggtgtaatctagaaagaattgcataattagtcatggtctatgagccgaacgtatttctttgttgcggtgagtgccagcgagctcatggcccatgttgggctcagtgcccacaaacgtcagagctttccaccgcgatggagtttacataccaacaacctcgggtgctttgtcttccgccattctgaagtgaattgggctcgtggagctggaataaacaagtaaatgcaaatggtttcgcaaaaagagttcggattgtaatccgtgtgaagctcgaggagaggaataaaccgagatcgagtcgtgtgcagagcgtcgaggcgtttagcgttggtggggttgggtggtggtcgcctgatgtttcaggcctgtcacctagggctttgccgaagacgtcatggaaatctctcccttgacttcatactgagcgacgttgattcgcgttaagaaaacgtgtaactacagtttatctaggtggaatccatgtttctttcgctatctagaccgtaaatgtctcctctaccccggattccgccacaacccaggatcgcccagacttccagcctccaaccccgaacttctcctcacctgaccagtgtttcccctcttaaacattcctaggaagtacatcgatgtactcgggcttttgcctttcgaaacctacgatccttgctatccgagcgctgatttcataatcgaagaggccaatatgcaacttgaatggatttcgaacattaaaagactcgagtatatcaactgagcccatgccagtaggatagcagaggcttatttctcggagaccaagacaaattggctcagtggcggtgtgaatgtccagctggagatgaaatatatatttagaacttgattttctcttttcgatatatttccgcccttctctctagtattgtagccataatgttgaatcactagccgccagctgtagaatacctgtgaaaagcacagtgactttcatgattgaataccatacctatagtcatcggtgcatcgaggtgactgaaggtggttatactataacttgcctcaggcatagtaatagcctgaggcattgcgacattcccctcactcgttgtaaacccatgacatagaactatccatgtaaccacaccgttgttggttgtttgattctttattcttctgatttcaacactatgagttctataaaacttccggtccgggtcttgacacacaatatccgatatgcaacctcatctcccttcaaaggcgaacgaccctgggcagaacgcaagcaattgctgttgaatgaatttaaatacgaggcccgtcattgtgaagaaaccttcatctgcctgcaagaagttcttcacaatcaacttgaggatattctggctggattgaatcaggacatggagcctggagcaccaaaatgggttcacatcggcgttggtagagatgatggtgacaaggccggggaatactctcctatcatctacaggccatcggtttgggacttactatactgggagacagtgtggttatccgagacaccggaaaggccatccaagagttgggacgcagcctccatccgcattgtcaccattggtgtcttcggtcatccggttagtcggaatgtggtccttgccatgaacacccatctggataatcaaggatctcaatctcgcctcgaggctgcacgtatcattaccggaataatttccgaatataaccagagaagattcccagagatcacgggcactttcttggccggcgatttcaacagcgaatataaccaggaagcttaccaagagttgacaaaaagcttgcttgatgcatatgagcaaatcgaaagctcgaaacgatatggtaaccacattacttggactggatttgggtacgaggatgagccagcctcacgtattgactatgttctggtgagacccaccggggctgacggtcagaagtcgacagtcactggctatgcagtgctagcaaatcggttcgacgatggtgttttgagctcggatcaccgcgctgttattgtggacttgacagttcagacttgaggatgtacatagcagaccacgagcatgccaagacgtccaggaccttccgaggtcacattatgtaacacacacgtggatcacatgacaataagtaaaattggtaaacagggtcataggctggcctggagcccatagatgagcattgggaataacctcaaaatatcttaaaggtagtattataccttattttataattcctttatggtggttgggcatgtagagtgaatggcgcgtttctttacgatcttagacgggtgcggacacttgtaacgggtactctccctctttctcctttgcctctttcaccatcaccccggctttaaaacaacagacaaccgccacagcttccgcagtttagaagaatctctcggggaaagaaactcgtcgattgggatcattgcagtcgattgacgaacaaggtcagctgacttggccccaaccgatccggagcggattctgcgctggaactcccgactggtccattcaaggaacatcggcaacagctctctcccccttcggccctggtatgttcgattgcttcccatttgggttcccagtccataatttcgatatgctgtccctattcaatccgtcgcataccctgaagtggtgacttgtggcgtgttcgggacatgcgcccgttgcgacacgtccatccaacaagctacattgcccaggtgacattggatgcacggtcgcgacggcgatggatagggtaatctactatctgaaaacatctgctaatcacgatttgatcgtatggacagattacatcccataatgctacggtagccgacccgaacctatccctgtcgcgttgagagccactccgagcttccaagatcatacgagtggcattagacgttcgttttgcattcatagaccatccaaaatgccatcccctgaagtgacgggtggctcgctgccctcagagcaatcattcggggaccctcagtcgggtgtccagaacagctctggcgcgtcggacacgggggaacaaggttcagacaacatcgaccttgggacaagccgatcaacaaatggtcatacgccagatacaatcgcagagggaaagcaaagcgcaaaggctatgcttgctgcttctggggtgtcagcctcgtcggaacccggcagtgaggtttccaatggcacgccccgttctaatgggacgcatggttccgtaagaaagagatctcatgatggatctgctgttcaatctacagaggtctccggaaccatggccgtacgcgcccgcgaaacgccactggataagattctcctggaacagtacgttgatcgcgaattccagcagtcggccgcagctgcctggaaaaatccgagtcaggagttacaaaagaataagcgagcggaacgcgacttttatttggcagtgcgacgcgaaaaccagttaaacccagcagcattgtatggcgtgggctatgagggattcggaaacccccgtaccgaccttcgcaatcaacaccctcaacttctctacccaactcatcgacgacgtcccggaaatagaaagacgcgagaactacgcatttcacgacgtgacgcaaagacgcagaatgaacagattgaggatttagtccctattcgcttggatattgattgggagaaagtcaagattcgcgatactttcacgtggaaccttcatgatcgtgttgtgtctcccgatttgttcgctgagaagctggtggaggatatgggtcttgcggtagagagctccgttcctctgacgaggatgatctcccaaagcatccaggagcaggtgatagactattacccgcatcttaacatacacgaagaccctcttgatccccaactaccctacaccgcgtacaaaaacgacgagatgcgcatttcggtcaaactcaacatcactattggccaacacactctcatcgaccagttcgagtgggatattaacgatcccaataattccccggaagaatttgcgttatgtatgacggatgatttatcgctctctggtgaatttactaccgccatcgcccattcaatccgcgaacagtcccaacttttcaccaaatccttatacattgtcgctcacccattcgatggccgtccaatcgaggacccagacctccacacctcattcctccccactcctgtggcttctgccttccgaccataccaatccgccaaagagcatacgccctatctatatgagttgaatgaggctgatcttgaacgtaccgaaatctcaatatcccgagagcaacgtcgccagaaacggtcgatcaaccgccgtggtggccctgctttgcctgatcttaaggaccgccaacgcacgattcgcaccatgattgtttcatccgtgatacccaactcagtgggctctctcgatgaaagcaatgtgatcaagcgtaccggttccagtcgccgtcgtggaatgactggaaaccggggcgatgatgactcagacgagtttgatagcgacgactcctctgttgactctcctgcgattggacccaaccttgcacagggcactgctcgtactagaggcatgagaggcgcggcatctgcagcccatgcggcgcttcgcgccagccttggacagtctgccacccctgaaccggtgtaccatgagccccgagtctcggcccgaagacagcaataccgagaagagagtgtcgatgactctgataagttgatagtgagattcaagatttcgcgcgacaagctggtcgatctgaggaacgggaggcgcattgtctctagcggacaagcatcacgcacgatggcacctccgtctgataaacagtcccgacttcatcctcccccgcgaccccaacaaaccggtgctgttgatgcaccaaaccctccgcagcctggtgtatctggcgtgagtagattttaaccccagtttttggcccatggctgaccctgtgtctatgcagcccccaccacccaactggctggcagctggtctcagcaagttgaaacaatctcaccccaacgattccttcgaaggcgtgatgcgttattccgccgttgataccgaaaccctggcccccgtgacgaatcccaacaacctccaggctggccaaaatatcaaataccaatacctcccccgtattcgttgccacgactgccccggaaagctttacactcccggcccgggcatgacagtggacaattttgaagtccatctgcgcaaccggcagcataaggagcgggtcgaagagcggctcacaaagactggtggcggtggtaccaactccgatggcggaagtgcgagtgccagccctaggattccggccaacgcaagtccagctcttgggactgcagcctctccctctccagccagtgggtctcagccatagtcaatctcgttcatgaagtgatgacaacggcgtcttgtgtgattatcttgtgtgattacttgtctctttcagatcgcttatattcttttacacatttgatcaattcaatccacctacttcttcttcatactcacgaagcctcccattctactcgtgtcttgcataggtttttggtttttcagtgccggaagcgatctatctttatccatctgttgggacccgatgaatctctggggcgtttgtgtttttcttgctttgctggaccatgtgtgtaatagttagcagtttgagagctggtttgagtcttggtaaatattcctgttcttttttctatggaatgatcttgtaggagtgatctcttacgtcacattgcaggctcgtaccttccctataacttataagccatcgcttcctataaaccaattccgcaggacacggaagaactacagtaagactggacgagatatgagtacgagactaccgcctagtactaggctcactcgtccattttctacgcacggcttcgataatgtgtacaatgcattcaaagaatcttccaaccttagccacctcgcagccgcgcttcttcaactacaatgtaaacaagtaattgagaagcaaagttcagttcatttacagatagaaagcaaatatctgacgggaatacgcaaagagacagatattcgtgagaacttcaagtagaaaaaaaaaaaaaaacaaggcagatggggtatacatctcggaccatcaccgactgcaaggaaacagagcacacgatggggacgaaattgtgaaaccataaagaagataatatgggcatcaggatatgaatatgaatatgaatatgaatatcgacggcaacaatccgcgcagtaatcgcacaacttattcggatctgagaacagcaactagatcgataccagacgtctatgtctcgaagatcttggcttaaaactcataagtaaatggccattgaaggtgtatgtctttgatgaaatgagaggcatggcccatatatgagaattcagctgaggggccgtgccaggcaggtcccatatagccctggaggttcttacccacgacgggaagagcgtcgcgaaggcatggttgtcgatagcttctttggctcaggcttcttgacatcgcccttggcagtagcggcctttccgcctcgcttctttgcaggaggcggcgtgggttccttctcactggcctctggctcatcatcgtcggcgagttctttatcgtcatccgtttcttgggcttcttcgttctcgctttcctccgcgtcatcttcgccatcatctttttccttgggtttattccactctgtcatctccatgtcggcatcatcgctgtcgttatcgatatagctgacttccgccttcgcggtgcctcggacgctgcgccggcgagaggaagtggtcatggcatctccagcgcctccgtcggaagaccagccgtcgtcgttctttgatttccgtctcggcttggcagctgcactgatcgatgatgtggacttgcgggcggaacgagatgacttttccttgcgtgcctttttggccacgaaggatttgccgttcgtatctagagactcgggttttcgcttcttgcttgatccgcccagtgaattgtgggtagagttattcctgggcttcattgcaattcggacgacgcgatctagcagatcatccaactcgtctggaaggaaattcttgtcggcgacgtcttgggcttcccggtgattgctcatggaggtgaagagagagctagggacgcccattttcccaggataggtctgtaagatgttggttgcaccggcggcaccgccaagcttgtgctgttgggagtagatatctgcgaaccggcgaatagttgcttgtgccagatcagacagagtgtggaggcgggtggagatctcgtctgatttggtgatgccatcacggaattgcttgacacgctgtccgacgtggaaaatcaatgacatgttgtgttcattggcaactgcggagaggtagaaaaggatatattgagagaagtcggtaaggtcgccgagtttcgttgcctcgtctagatcctcagacgggtaatcagggtggtaggcaagcaaagaaaggagacgagaaaagatcaattccatgaccatggtctgttccgtccgtttcccactagcttgcgcctgctgggcgaagtatgcggctcgggatcgcatccatgtgagcgtgctctcttttagactaggaacaggttcgaaagcaagcaaacaggggacaatgtaccaccggtggctcagatgtgacttctgcaccagtttctttttcaagtggttgatgaatccacttcgcacttgcaacagtgggtcctgggcaaccaaagcgattgcattgaaatctgatggcgtgagcagaccgtcgcagacagtgctggaagcacacagcttaagcaaggactttgcagcgaggaggcgaaggcgcggtttttggcatgcgggggtatcttttttcttagagatttcgccttcaccgaccactaatttattcaatgtttcgtagacaggctttgcgtgggcacggaagtcagcttcattatcggctccgtccttagccctaagacggttgacaatgattttcaatgcccattctttagccttggtctcatcatcaactgtctctgaccagttgtattcagagtctggttcgggtgtacgattggtgagcaggatttgggtgatggcaatcgaaatgatggcatcgcttttttcgtctgcttctctcggtgcaagaaggttcagctgcgacagagcagctaggcgagtgaggaatcgatcagagccgtacgtccacttctcaacgcacttctggaccaaatctttcgcatacatctcttttcggtcagccgtagccataagaattgaaacggcatgttttgcagaatgcggtgatgaactataaagggcatagttggccaaagcctggagaaacttgcggtctttggggagtttagcagggagctttttggcgaaaccagcacaagccttcaaaatatcctcggtactaccatcaccagccgaggaagccttgggagcttgcgcctcgaggtctttgcacatttcttggacttgtgcctctaggacttccggattttgagatgaaatttgcttcaacatctcctgtgcagcattggccaatccgttctcatctgttcgggacaaactcatgatcgccggaatgtggctccgattgaaaatcaaagacccacaacgatacacgagaggagtcaatgtttctagcaggggagagttgtttgcactctggacccgccgttggagttccttcgtggccttgacaacagtgcgataatcactcacagcagccatggtgaagcgaatgagctgatagctccgtcgatcatgcaccttagcgaacttccacaggtctgccgatgcgcgtggggcatctggaaaggttttggataatgactcaataatcttggacaactgtatcttaatcgattcttcgtccttgtcgacgacaccgccattgtacttctcgcaggcctctagataaagcgtcactgccgatctcatcgacaattgacgggccaacatgacgaaaaagactcgcctcgccttttcatccagtcctcggagtagggtaagaattcggcggactcgaatcttgtcaacatctgtctcttgctcgggttcagacgcctgactatccttctgcttctgtgattggttcgagttgcctcgggaaagtttcgttttgatggggggataaggaagtggcagaagcgtctcaaacaagacgcggtcgatcagaatatggatttcttgatcattggtgtagaatgcatcgaatatcttggatggtgcatctttgagaagggacacgacgggctccgtattttgctcgatgtcaccagcagccactgcccacatgcgagccaaaatcttcatggcgtgttcacgcacatgcggcttgcgatccttcactcgctcggcaagaatagcaagaaccgagtctggtgatgaacagccaccatccacacatagtttgttgattatttgggaatacccaaattgcccaacagtatccactgcagccacacgaaccttctcatcaacatcgcggagcatcgaggccatatttctgacaagactgtgttcttcgttttcgtgtaggccagagcctccagctgaggttagcaatattcgccccacaactgtgacccaggcagcacggactgatggtgtcttgtcgagacgacggctcaaaaaggcttcataggccgagttgtggacttgagagaaaggcttaggggatacgggagtcaacaaaacattgggctggggaatggtcttgtcataatccactagtgacactggggggtaagttgtggggtccatgggaggagggggcgggggacctgcaacaccgattccagccgcgaggtctccgatcgtctgagtcgccaataaacgtagggccactgattctgcagagagctctgcttcaatctgcgggataacattctgcaggacttctggacaagcacgccaaagctcccggatcaggcggtgtgccttactcaattctttgatatcctctccctcttcatcagagtcatcgagatgaggtttccgggcatgcttagagccatttgtttgaccagctggaacagatgcatcgatgatgacattgttaaagtactggctgatgtgactggtcattcgttccggacaggcctgacagatagccttcgccatgttataagcggccgggtagtctttcagtagaagcgtgtcctgcttggtgtcaagcggcgcatctggtcgctttcccttcttattggagctgtccatcactcgcgggtcgactcgaaggaattgggcgacgataacgtccaccacctcgggggccaggacgagcgattcatcgatcacagtgacgagcactcgggtcatgtcaaactcgacattcttagctacttcttcgccggtcgatgctttcgaagaacccgaaacgatgtcgaagcagcccgtgaacagcgggataatgagcgagtccggatgatcaagatcgaccatcagaaccacactcttgacctcggcgagagatcccaagacatagatatgctgggcattgtaggcgttggatgggtcggccaaagcggggattatcgatgacacgatacatgtgaatatatcctgatttgatcatagtcagcaccttattcaatcgcatagacaaaacacatattttgcaagatcttccatcgccacaccttcagttgattgcgcgtaaaaggcgcgtctggtgcgcatagtcgcaatacatcaacgatgcagcacgtagcccatgctctgacgcccttatccttgtgggcaagcaagttcccactggcaagttcctgtgacactttccgtagcgattccttatcaatttcctcctggtcgagcttgcggagttcctgcgcgagagtctggagacgttcgaggagatccgcgatggggatggcggagcgccccacacgccatgagagcggctggttgaaggatagactccgaagccccgagtcttcctccacctcggaaggacctgggcgagagcgcgaaggcatcgtggatggtcgcagttctcacatggactggggaggtggagagtttcgactcgggagtttgggtggaggttgaccgcccaggacgcgtcgcacgggaccgcgtcctgccctacaaagttggtactgaaggtgtcatacggtacatgctgagatcatttatttactttgaaaaagaatgtcaaatctgccagtgtcttgggcttacaactcatatcatattaattcatacctatctcacctggggcctaggttgcacttgctggtctaacccgggagccttctcttttaggaaagatacatcgctccagagctccttttaagagacaagggtaccctgtataacaaattctgggcattgctacgtatagctgtgaataatctagaggaaataattctggtgaagtttatataaaaggaaatggcggaattcccccctcccccaccaccaaggttctattgtttccgtttagtggatatcatgcgtacgttttttccagctcataacaaagcagcaggttaaataccatttatactcagatacattgctacatgtatatagagacccagttctagagatattaataatattgattaaaataactaactatgccttcagggatacatgacttgtcataaaacaacggagtagaccttctataacaaaaatcgtcggacttcatagatctgtcatcagaacaatgcaagtgaaaagcaaacctctaatgccatatatgtattcatgcgcctgaaaatgagagataggtggatcgaccacctagaacttaggactgaacttgctcatagcgcgaattctcgaaccgtagatgaagaacaaaataggaatggggatcatagcgacagtaatgaaacctagaacgctagatgcccaagccacacctagattgttgtacatttgtgtagcgaagagcggaaaggcgccacccatggttgagcggatgagagtattcgccgcgatggcggagttggcgaacatcatgtacacatcaataatgtagttgagaccctgcatgaagataaccaggatacctagaccgataggcacgccggcaataacctgcggcacccaggagatatttgggttggaagtccagccgaaccagaatagaccgattggcagcaacacagaggcgatcatcattggcacgaggcgctcttcgggaacgaccctgccatgtttttcaagtttgcgcgcaaaacgagtcttcgtggtgtatatgatgagacaggcaccgagcaaaacgccgataagaatgccgatgaatggaagggcagccacgccttcgtgggtccaaccgcgaacttcgccgaacgaaatcgggtaggcctcgaagaagaggtagaggattccgtaaacaagagcgaggtagatagtcatggcgagcaggatgggctcttgagtaagcatctggaagggtcgtaggaggtacttggtaacgatatctgaaaatgtgggctcgtgcagatccaagaaggcgtgaatggccgagttgccggtttccttgcgaagacgggcagctttcttttgcaagatgactgggccgtaggtctcgggaatgacgaagagagcaattagaccgaagaaggaggacgcaattagggtgatccatgcggtccaacgccagccaagagatgaatctgtgatgaagccaccgctgaagaatattagtgtctggatagtgctttgagggatgtctttaaggggtattttgaagagacaatttgagtacttacacaattgggccaagaacaggtcccatgaaagtagctgaactgaagagagcgatagccactgcgcgatcgacggggtcccagatatcagccagggcaccgccaacgacggccaaaggagagcagccaaagacacccatgagaaatcggcagaccaggatagtttcgaggttcttggcgacagcgacagggatctggaagatagcgaagacgaggtagcctgagaacagcgggatgcgacggccgtatagctcactcagcggtgcccagagcaggggacctagagcgaaaccaaacacaaccagactagtgccgagaatcatcacttcagttgatacattgaactccttcgcagtcaccagggtcgcagtcgaaaagacgctggatgcgaaggtgatccacacagtcataaaggacatggtaaatgtgatgatccatttgcgcagattgctgtagttctgggggttgtgagggtcatctttgccatcccagtcgacaaggttgggctctgcattggaaacagcgggcttttctagggtgtcgactgcgttctcgacatctgtttcgttcttctcatgaatagcgttggtgacgtccacctcctgttccatgctgaggcgaggtgtagttgtagttgaatcaaatggtggcggactcatggttgctctaaatacctatgtatataggtgtatgtgcgagacttccgccggtgtgttatgagagaagacaactttgggaaagaacattattgagacaggggccatatgacaatataacccccccccggaggtcccagaagggaataggctcggagctcaagacttccaaagctttgtaaaaaaaaaaggttgtggagaagctcattcggtatcggccgttcgctcctccactatgtccgcgatgtactcaaccccggatacatcagttggaaaagtcagattaaacagcgtcatgatctaggtcaggccaatgagagcctccttttttcatagagtccagtcgatccctaaccttgataatctatagccacctgggcatgtcacctagatgatcaaattatcttgatatacttccatggcgtcagtatatttccatgtggcgacgggtacgcaaaattacagaactagaaaaatcctgaactccatggaagtgggaaatggaccagttaaaagcacgcaaacgtacgaaaaagcacgaaattggttgcagttccggtccaactttcgctctggtcgctgtgttcgctctcggcttcaatttaaaaccgaagaaaagtggagatctcggcttcgggccaaaaactgaagtgccgagatttatatctcgggctgaaaggattgtccgagagattatcattgtctgagctagttatgtagtttgatgtatatgattgatcatataatcatgatctcataagcaagcacggagttagaacaacgggaatatctcctaggtatgtccggctactgttcttgcatcaacaaagcattacgaggacaagaaatacctctacctctgcggagtagataatcatgatttcaaggttgcacagtcaagaaaaggacatgacattcattacacgacatgaaacaacataaaaagcaagaaagacgacactacaaacactacaacaccaatgaacgtagagatttctctgtattggctattatggcacattgtatgtgggcaaaaacaggaagaaacgaatcgaaaaggaaaccccagcaaccaggcccgcatctccaccacgcaaaacgatctattcataagcgaatccgagcgcagaaacccgggcatgactgaactgaggaaaaacatgtcataccaccttctagcaaaagaagcgtttaatcgtagaggctgtcgtcattgccggcttcgccgaaggtatcgttctcctgaacttcgccagcagatgggaagcggaagaagctaccgcctccggtgttcttcaggctctgggcgaaggcctcgtagcggcggatctccacgtcgctaacagagcggcgggcagacttcatggcctcctcgaagtgagcgcgagtgagctcaggcacgggatcttccgcttcctcatcctccattgtgatgtcctcgccggcggcttcgcgctccttttggcggtcaatgtcggcggagatggcctgcttgatggcgagcttaacggcacgctgtgtcacgaagccgagatcggcaccggagaagccgtgggtcttgctggcaatgtaagcaatatcgacatcaccggcgacaggggtcttgcgaagctgggccttgaggataccctcacgagaatcctggtcaggcaagggaacgtagaccagggtatcaagacgaccaggacgaaccagagcggcatcgagctgctcaggacgattggtagcaccaatgacgaagacgttcttcttggaggtcataccgtccatctctgttaggaaattagtgaatattcggaacaaaatatagcaattaacagcggagacttaccagtaagaagttggttaacaacacggtcagaggcaccaccggcatcaccgacggagccaccacgagacttggcgatggagtccaattcgtcaaggaagacgacacaaggagcagcagcacgggccttatcgaagatatcacgaatgttgctttccgactcaccgaaccacatgcttagaagctcaggtcccttgacggagatgaagttggcagcacactcattggcaacagccttggccaacatggtcttaccagtaccaggaggaccatagaacagtacacctcgagaaggcgagagaccaaacttctggaacatctcggggtggtccacggggtattggacactttcgacaagctcgcgcttgacctcctcgagaccaccaatgtcgtcccagcgaacgttgggaacttcgaccacagcaacctcgcgcaaggcagaggggttggagacacccagggcaaagcggaagttctccatggtgacaccaagagcctcaagaacttcggcatcgatggtgtcctcatcgagatcaatgagatccatcttctcacgaatctgctgcatagcagcctcggagcagagggaagcaagatcagaaccaacgtaaccgtgggtctcggcggcaatggtctcgaggtcgacatcatcaccgagcttcatgttcttggtgtggatctgcatgatctcaagacggccagttgggtcggggataccgatatcgacctcacgatcgaaacggccgaaacgacgaagagcaggatcaatggagttgggacggttggtagcggccatgaccacaacgttggagcgggccttcataccgtccatgagggtgagcagctgggaaacaacacggcgctcgacctcgccgttggtcttgtcacgcttgggggcaatggagtcgatctcatcaatgaagatgatagccggggagttcttctcggcctcctcgaatgctttgcgcaagttcgattcggattcaccagccatcttcgacatgatctcgggaccgttgatcaggaagaagaaagcaccagtctcgttggcaacagcacgagccatcaaggtcttaccggtaccgggaggaccgtacataaggataccacgaggtggcttaataccaatggacttgaacagctgaggatgacggagaggcaactcgaccaattcacggatctgagccatctgcttgcggcatccaccaatatcatcgtagccaacctcgttgaggttgccctcctcatcctctcgttggatgggctcaccctcgcagtgaataattgtgtcctgggcaacaatgccgtattcgggagggtcgacctccacaaccttaaattcgatttgtctcataccacctcgtactgtgaacaggtcaccctgtcggactggacggtaggcctcgcggaagtagggagcaaggtagacatcgaagagagagccggtcagaccctcaatcgtatcagcgatgggaaggacggcaatgcgcttggcctagatcacgagcataaaattagccaatagatcatggtaaaagatgacgtggaaatgcacaacttacgtatttgatatcggggcaagggtgcacagtgatcatgtcgccgtgcttgacacgaaggttgtgacgcacaacccggttgatacgggcgcttccatcatcgagatcgtcatcggccaggacgatcagcacagtgtccttgcgcttcttacccttcacgagaactgtatcaccacggaagagctggagggtctccatggtgttgttcgagagggcaataaccgagttatcatcgttaacggcatcggtcacgctgggtgaaaactgtcagcttcttgcctccaacagatatctcttatcagctactcacatcaaggaattgggcttcttcttctttttcaagatagcggtggaggtatcgagctcctgcaattttcgtcagttccgagggcctttgtgagctgtcctgtagcctatgcttacctccttcttctcggcgcctgaagcgtccctggagtccagttagcatactcaatagtcaagagagttcaaatgaagcgtactgcaagtggaccctcttcttgtcatgcgtgtgatccggctcggaagacatgatgggcgtaaatgaggttgtggcggtgatggaagcaagcttgagtgaacaaaggtgtccagtgcccaaaaagagtcggagcgagacacggatttaaaatggaacgagaaatgagtactgaaaatgaaaaaaggaccgatagatcagaatcagagagcgaacccgatgacggcaaagtggagatagaggcaggtaacaggaatgatgatgttgagcttcctacctctgctcttagaactgatgatgatgacttaagcccggtgcttatgtcatcgcgttgtccgccacaacgaagcgcatggaactcattcgatcgggagccttgatgcctggggaacggccaacagtagatatggttaccaaggtccttacaataatacattcaggcgagaatcttggaacgattcaattataactacagcaaccctaaagagtaaatagaaagttcatggtgcacttgcttcagagttgaagaaattccaactctgggtgaccggttaagacaaggaatagatccatagcaatgccggccaacggcgagtcttctaagtcatcggatgaagacctatttggcctgttcaaatgctcaaataatggagaaaggtcgtacacttagaagcaagtgatatctttagttgtagattcagcaaaggcttggatcgaaagaaacgccctccaaatgttcaagccaggtctatattccgaaaactggtgtaaacctagaaaatgcaaagccaataacaaaccatgtgcgctgtcaacatcaggtatatatgcaagtaggaggatattcgttacaaataggaaaagaaggaaaaggccgagaaccaccacaagtaatctaatagctatgccttgacacttgcggttccagcccagcagtcatggagactccaagctccggcgcagaagctgataagcccggtcaagctatcaggaataccgatgcctttctcgagacaccagtgcagacacaagggtgcccagatgacgttgttcaccatgctctttcgccaagcccggatctccaaacgcagtgcctcgctatcttcggccttggtctctttagtctcgaccgtgccggcagccgctcgttgtgcggctaaccgttgtctgcgtagcacactctggcgccagagcacaaagaactggaagaagatgtgcccgaaccatccacgggtactccagatttcccatttggcaacgccgccatatttgtccacgaaccgcttcgagaccacccccttggaagcaagatagcccacgttctcgagaagctggtagatcacgtttgagatgacctgcagtacggttagggcgtggagaatggggtcggctggcggcgatttgagggtgtcagctccccagatccacaaagggagcagcccgaacagtcgcaaattgtatctcgtctccgatgcgagggaggaaagggccgcgaatttcgattttgacgatgcgggagtgacgttcttggtgggtacacgaccctttagccgcgcaaggatacccagctttgtttgcaatgctatccagggcgctgatgcagtgaggtggtggagcattgaggcgacatagttgatagtcgctagtactcgctcttgcccatttgcctcggaaagtagtctgcgggagcggtcagcgatattcttgccgcgccccggaacataggattgaaggaggccttacagatccagccgacggattgtcacatcggttgttgtcaaggcggctagcagctgccgtttcgcgcatgagctcctggcgggtgcttgcccaggcggggcatcagtcgcctcgcctggaaggtgttcagggtcggacatcgtgtatgatgaacataagaaaaagcgaaataaaatgtggaggtggaatcgcacaagcggaaccgaggctcggaacttgaggaagttcgatctaatctccgagggtcattattccccagcatttcggtcatctgacatgacgttaaccatatcttgagtaaccatacggagtagttagttagttgactaattagtgtataactatatttttctcgtagctatcttgctggcttatattaaagcatacaaattaattaaagcctactgacaccttgatccgctttacgtgcttagttctatactatggcttcacaggatacctaatttaacatcatttacatagtctacatctttctagtaacttttacttttacttaaaatcatgcttggaaattcttcatttcgggggaaatcccctagtcctcacatgtggaatccgaattccaccccatcctcctctcacatgccgctcaccccccgctcaccccggcctgacttcgacctcacctccacctcttcctcaccccggcttcaccctccctcactcccctcccctctccccaccgtgaatgtagcaatgcccaaatgggccatgaataaccccgaagggcaagaaaaacaacaaaattgtgaggaccctagtcctcaccgaagggatctgccgtcgatccctgctcgtggtcagactcacgctgccacggcgaaggcaggattcgccagtccgtttggggctggaagtcccaatcgacggtgctcgtccttggtggacgattggcgaggaggttctccaatcgtctgagctcccgctcgtgacgttgtctctcacctcgctgctcgcggaggtcatgtaaccgccgacggaatcgacggccggtgtggcgaccggcgaatccgagatgttgccgagcacgaccaaggcgaccggacgactcatgattgttgtcacggcgcgattggaagtatcgtcgaatgttacccacaagacgtcgaatattgcccacaagaccggtgggtgtgccctcgtcggagcttgcataagctgcataggagtgatcgctcgcagtggtgatgaacgacattcttgccattgaacggccgtttggatcctcgacctggaagccagaaggatacggcgccatgccggagtggtcgctggcagtggtgatctctgacattcttctcatttcataagcatcctcaacctggaagccagaaagatgcggcgccatgccggagtggtcgctcgcagtggtaatgagtgacattcttgtcattgaatagccgtttggatcctcgacctggaagctagaaggatacggcgccatgccggagtggtcgctggcagtggtgataagtgatattcttgagattgaatgacccctcggttcctcggtgatgaatgaggtcgtcacttgaggctcttgtgactcggcctggaagccagaaggctgcggcgtctccgcggaacggcgtgaaggcatgactggtgtcatgtcgggatgtgtcgttcctgacagaaatggtattattgcggatgagaaagcacaagaaatgagatgtaaggactcgcggtgtgctgccaggagccttacacgcaggaaaggagagatgcttgatacttcacccggcgactggaagccgaagaagtaacgcttgattgcgaaccgacaaggtcgccggtgtacggccagaaggcctacacgtggggaaaggtacttgatacttcacctggcgactgggagccgaggaagtacgtcagtcacgatccttgagtgtgaactaacaaggttgccggtatgctgccagaaggcctgcacacgggaaagacgttgcaatgtgatgagaagtgataaagcagatggaattaagatgaatcaatgaagagaaggggtgaaaggatgattggaagaaatgaaaggatgggtgggagagaaggaaacaaatgaggagcggtggtgttcaagtactccaggcgtgtggtcgccataatttggatcgcatcgtcgctgactcgttcgttgactcgtcggggccagcggtttatggaatgagctccatgatcgcatttttccagcgacaaccccgacggcgacctaggtgaggtgagccgcgtttacgcggtatgtaacccattgattcctttgcacatactgctcaaacagcataggtctaaatcgcagagcgtaactataatgataaacagttgtcattctgacttctgtttatacagaatcaccgatacttggcaaatgttccatccatcacattgcctggttgctgctcactggctcatgtatagatttggctgaagtgttatattccgacactggaccgagacatagctataacaagcttgaatggcacaagggcttgctttatgtctatcaactattcgggggatgccgtcaaaatacgttctgcaaccatgcagggagagatgtggtgattcttattgattaccttacctctagagctctgttacctagaagaatatgggctaatagactagattttggattgccagactaccggtttgatagatgataaagaggcatacactccgtagtcacgggtaatgaagtataggctatgtatgttgtatagaactcactacaggtctaagccgacaaatcccatatctctacatatataattcatttagtcttgagcgactaattcagctacagaaaccacaaacatagaagagagacaatccataagcctaggggtgttaaaagaagtgataaccccgtgaccatgaaagccctggcattgcaccaaaaacgacaaacagtgaacttccaagattcattatgatcaggatctaaaaaaaacatagatctatataataaaatatacagcataaacatataaaatacatacaacatactccgtatacaacgttgttaatgataggggtaaaatcgtcaaagcccccagatccaaccaaaagccgtcgggggtttccgatgggctccgccaatggatctcgccggggatccatccaccgattgttcgtatagccgtctcgatttcctggatatattcttccgacagaatttatttagtcggagagtgattcaagggagatattttgtgtgagttatatattgacggcctcggctgtcctcccccatatcccatcccagcccagccaccctcggaccgacataaacaaacacgccccccccccccccctaccccccctattttggnnnnnnnnnnnnnnnnnnnnnnnnnnnnnnnnnnnnnnnnnnnnnnnnnnnnnnnnnnnnnnnnnnnnnnnnnnnnnnnnnnnnnnnnnnnnnnnnnnnnnnnnnnnnnnnnnnnnnnnnnnnnnnnnnnnnnnnnnnnnnnnnnnnnnnnnnnnnnnnnnnnnnnnnnnnnnnnnnnnnnnnnnnnnnnnnnnnnnnnnnnnnnnnnnnnnnnnnnnnnnnnnnnnnnnnnnnnnnnnnnnnnnnnnnnnnnnnnnnnnnnnnnngaacaccgcccccccccccccagtctcaccccatcgtgtcttcccattttctccacttggcatcttatcatccattgcatgttaatcccattcacattattaacttattttaggcgcgtgtgtaatctgaaaagctctcttaattcctcctgaaccctcctgactcctgccctcctccaaccccctccgatccccacaatgtccgtcaagttccaagaggagaccgtccgcaccgtcacgggcggcggcaagtctgaagacctcgcgcatcgcgtcggtgagcgattgaccggtggaaagacagcggctgggtatctccaggtatgcagcgcctacccctccaataacatcgagccaacactgatccggggaatggatcgtcaataggcatacctccttcagctccagaagaaccctctgcgcacgaagatgctcacctctggtgtgctctccggtctgcaggaactgctagcttcgtggatcgcccacgatgtcggcaagcacggccactacttcagctcgcgcatccccaagatgtcgctgtacggaatgttcatcagcgcgcccctcggccacgttctcatcgggatcctgcagaagattttcgccggccgcacaagtctcaaggccaagatcctgcagattctcgttagcaatctgattgtacgtcgtcgctgcgatcacctgtcctgagattcgctaatattcccccgttccccagatctcccccatccagaacagtgtctacctgacctccatggctattatcgccggtgcgcgcaccatccaccaggttcgcgctaccgtcaaggctggcttcatgcccgtcatgaaggtcagctggatcacctcgcccctgtgtttggccttcgctcagaagttcctccctgagcacacctgggtgcccttcttcaacgttgttggattcttcattggaacctatgtcaacacccacaccaagaagaagcgtctggaagctctccggaaggtatgattttatttcttggaatttgcgacttgattgctaacgactcggcagcgttacgaccagcgtcgcgaccccagctacgagaagcgcgacttcccttaaatgggccgagtccgcaattgactgcaaatacacccggacgcgtcgaagacctatgtgtgtcgtctcttccggcttgtctgctgtcacttggttatcctttgtttactattctccggtgtcgatctaaatccatgtacacacccccgtgcatcttgacatgccgcagatatctcccccttgatgttatcactcaacctcatgacgaatggctttatatctctgttttatttcaattccaacccttgaagatcggtatatatatcttcttttcagttgagctagtcgcgccgttctacctctgctcatctataccgctatatacatacactagtcgggatagctataatcgaatgaactgcaactgcccttgacatgaaaacggcacaatgtggccattatgaattctgtcgtaactatgaaagatctgacacacagggtgtcaatggatgatacaagtgggtgggcaaggtacaagtagacatggccagcccacccgaaaatgagaagacacaaatccctcacatccaacatccacgaagaggccagaggctaccttattcaacctccatctctgaggcctttccccgcttagcctgaacccaggcaacaaagtcatccagagcaccgggccaagccccatcaggactccaccagcccatctcctcatcttcgagactcttgcgcataaacacctcaacctgctcccacagatccttgttaacaggcttcttcccgcgctcttcgaggaactcgatccaccaatccagccacggggtcgtttcggtgttccaggcgacaccaccatggtcagttgtgaagaaaagacgccactgctcggcggcgatttcgaattgcaggttgcgctgtccttgcatccgtgagagcgggaatgcgtatctgtagactcgtcggaagaccgctggctcttgtgggatgacctcccggaggtacttggcgtacgcttgcattttaggcagggtgtcgcagcttgtgggttgttagattggataaataacattgaggatgatttgagtccgggttgaagtgggttttcttcgttgatgttgtacttaccgaacgttcagccatccgtccctccatccctggcgggtgaactcgcccatcgatggtgacttgagtagctcggcgatggctaggcaggttacttcgtcgagctcgacattcaaatcgccgaggtaatctatggctcgtgtgataccgatggtatctgggctctcgactgggtcatctgggaagacatgagtatttgtataaaatcactagtcaagaatgagtaaatacctcggtagctttcgaagagctttgtaaattcggaagtcacaactgcagcagtgccagccgcggcggcgaagaaactattccagtgataacgttagcatcgaagcatttcaagagttgtccatgtatgatatcttgagagcgggatggtcaggtatatggtcgtggggctagggaagggcaatcacttcttcttcgcctttctcggcttcttgactcgaggcatttgggacgatgaagtatgtagtgagagattcaaactttccccaagtgagacttaggaaaggctgagaaggaaagatgctctagcgacctgctagcatcttgggacttatgtgcaggtaggggttggagacaaataaaacaaagcgacacaaaagtcaggtacaattatgatgacaagcacttacgcgtcaagcgcgggagccaaactccatccacatgctttgaggaactatatcagaaagttagtcctttttgatcccacgtgaccggatagaagcatctcaagatatccaagcagaccacacaggagagaatatgccggtaaaacatgcaagttactcactttcacagcaacagactcctttgtccgtgtacagctgacaaactcagcgattagatgcttctggttgcttgtgtatggtggcatggtggtggttgacaatatgtgtgtccactacgcgcgggagaaatgaaataagtggtgaaaacacgcggggggctaaaagcaccagatttgtagtgtgcgcgtgagagaaactatgctcggctaagaagttacgagaaacaccagggctatgaggactgtagtgagttatcatctggagctgcccgtgatcatggtgctgactcatcatgtcctccaaacagtcctaatatcaactacaacccgggctatacatccatgaatagacttggcatgaggttttattttcattacattggacatggatttgtgagtattcagagtatgtattttcatatagtaaccattacagagaagtttgtggtcaacatttgccatcaattcatcacattaggagcaatgagcacgggattcgatggtaaaaagtacagtcaacttttgtaagatcagatagatcaggtagaactcccaaacgccttttgcaagttgcaaacatgtaagattcggtgttcgaattcgtttaggtggtgaacaacgtatcctcctattatggatgttagcaatttgatccttgataagttgaagatagatccaactcacttctctgaggtactctcctgcgtcggcctgttcatttgagttagccaatgtaagtaaaaacctagagctgagctccacctacctgacgatggatcgcgatactggtaggatctaattttgcgatctgcgcggatgaccttgctgtaactccgaatcccagagggacgtcgttggagtccagaatcacaattccctggttttctgcgacatcctcactagaagacggtcagccttgaaaaaggatactcatttagatgataaccaacctgaacctagccacgtgggctttcaaaaccgaaccgccatacaacagaggctgaaacttgttagcagggtacagcagaccctatcgaagttgagatatcaagcttaccatcactccgtttgctttgatccagacctgtgccagagatatagagttagcatgcctggttgaaatgcttagattgtgatacgtaccttgtatcgggcgtgttgcgccaggagatccagagctgttaggttgatgcggaacttgccagtctgccataatattagcatcactgatcagaatatgaacagagcttatagcactcgccttagtgtattttcctatcatagtgcccatgctgagaagctgatcgcgcgggaatgagatgctcaggttggcaatctccttgttcacgtagtaaacccgggatccttgcaagcggaaaacactcatggatccatcttcggctggggtaataagagaattgagactgcggccggtataggaagctagcttcgtgaagagcgtccgtgtctcttcctaaaagcgtgataggttagtcaaagtaatcaatggtcattgcatttagtacgcacttctgtgagggatctcatattggcggatatgaagctgaaaatatggcaaaacagttgagtagcaacgagcttgtattgtcgggaggtgaggagcaagaaaaaaaaccaatgtcgggcaatatctcaccgccaagaagcggacctgaaatttatagcgatggaccggacatgaatagccaatcagagcaatgtttgtctttccgcctagaattttcgggaccgccttttcactctaaagatattttttactattctccgcaaatttcaccgtcaattccccaaatctccagctacaaaatggcgcgtggtccagaagtgaagcggagacgattgagtcctccagccgatgttgaggactcctcatcgcgctccaaagccgaccaagagtgggatgttgagcaagactacgaacgtcgcccgcgcaagaacaccaagaaagctggcgagaacgcacgattgccaatcaaaacatctgaaggctttgtccaggccgaagccgagcctgcagaccagggcgaggaaaccgacagctttctgggtaccgatgatgacgaggaggatggctctgagggcgaggacggagaagaatctgaggaagaagcacccaagattccggtgaagctacaaatcttgcaggcaaaggaagagctagctaagatggcaaccttgatcaacgaagatcccgaggagcacatctctttgttcaaaacgatggccgagatggtgtcgaaaaaatacacacctgtcacagttaagaagctggctctagcctcacaggcggctctctacaaggatgttattcccggataccgtattcgtccattgagcgaagaggaccagactggcagggtatcaaaggaagtgcgcaagctccgagacttcgaacagtcccttgtggcaggatatcgagcttatgtccagaagcttgctatgctggtcaagccatccaaacaagatggccccacagatgctggactgaggagcttcgcgatttcgatggcttgtactatgctcttagccgtgccacacttcaatttccgcagcgagctcctgaagatcttggtgaaccgccttgcacggagaaaacttgatgccgactatgttaagtgccgtgaaaccatggaggaagtatttgccaaagatgacgatggaaccgtttccctcgaagctgttcgtctgctagcaaagatgttgaaggccagggacttccacattcaccccagtgttttggacacattcctccatcttcgtttgctcggcgagttccacttgaaggcgtctcgagaccgagtggaccgggaagaagaagaagtcccccatggaaagaagccaaagcaaaagcgtgaattccgcacgaagcgagagcgcaaggttcaaaaggagcgaaaggaagtcgagaaggatatgcgacaagcagacgcagtggtatcgcacgaacaaagagacaagaaccaggccgaaacattaaagcttgtattcggactctatttccgcattctcaagctccgcattcccgaactgatgggtcctgtgcttgagggtctggcgaaatatgcccatcttattaaccaggacttcttcggtgatttgctcgaagctctgaaagacctgattaatcacgcagagcgcgaggaaatgggcgtagaaggcgaccaggaggtcgtcaacgaggaagacgacgaagatgaagacaatgtcacaattgccgaaagcgcagcccgggacgctcgccgaaggacgctgctctgcaccgtgactgccttcgccctactagaaggccaagaagccagcaaagccgccgcaggtctccacctcgacctgaacttcttcatcaagcacctctaccgatccctctactccctctccatgaacccagacgtcgagttcaacccagacacagccctccgcctccccgaccccaactcctccgcggaaggcaaacagctctctgagtcccgctccaaaaacaaggtcaacttccagaccccgatggtcctcctcctccgctgcttgcagccaactctgttatctcgcgcacacggcaacccgcccccaagccgacttgccagtttctccaagcgtctgatgacgacttctctccagttgccggagaagtctgctcttgcaacacttgcgcttatgaaccaagtctcgaaatatcatggtcgtcgtatctcttcgctatggcatacagaggagcgcaaaggtgatggtgtgttcaatgcttttgctgctgatattgaagctaccaatgtctttgctggtacggtgtgggagggtgaactgttgcgtgtgcattactgtccacaggtgagagaggcggcggttgagattgaaaagatgatgatgtcttctaagtaaatactgtaaatactgttttgaataattttacatgcatatccagctacaatctactctacttggaaatttataatcaaacatcttcattgacatgctaatccacacaggaaatctcacaaagctggccccatgtcctccaaatccaacaaagagatgagagctggttttttggggggggggggggggggttttggttttccatttttttttgtttttttttttctggttgtacttgcatcatgttgagcactggcatggctcgcaagtaagcgagcttacctgcgagcccccatccttgccaggctcaactgggggacacgcggcccgaaggctccgcggtccggatcgtggagatcccgacctcatttggctgaggccgggacagagtgtgaacgtcggcgagtgggacgggcacatcaccgacagcatcccgggggatgcgaattccctaaggaatggtgggcacagagggggccgcctccccctcggtggtctccttcgcggaagaagagctggcggacttcttcgagcccctcttcttcgaccgacgaggaatcgaactctttgcagagctcgatcctggcgaagtcattgtcgcggacgccgcgactggtactgggggagccgccgttgctggcgaaattgctccaaccccagaggacacacgagtcctcagggtcccagtgggtgcaacggtatcccgtgcaggcaaagggttgggtggaagaatcctttccacgtcatcagacatcttgagtccgtgctcatcttgcaggactcggagagcagtgttgctgcggatcagcatctgtctcaagtagagaagctgctttccgtggtcttcggtctgagacccgatctcctcaatatcctcgtcgatctctttgttctttcgacgttggtaggccaggaattgctcatcggggttgtccgttcccccgaggcacatgtcgactttggcactcaggttaccgaaagacgaggtcagctcgttgatgtcgctgcgcatgtcgtgaaccacctccttgatttcggcgacctgttccttgaggtcgtgaacctgctccttgacgtcatccacgtcaagcttcgccttggtaacctcgaaagacatgtcagactggcgctcaagttgggcatccatttggtccttaatgtagtcccgggtcacggtaacaaagtcatcgactttctgttcgagcttgttgatgttgtcgatcttctttgacagtcgctggatgtctgtctcataacggtactgaagagatcgaacagcctcaggaagatccttgagagtcaagttggaacgtggcacggtggtaagactgacaccgctagtgcgctccatagaactaagactgggacggtgcatgtcatcccttctgaagatgggtgcgcgagggctgggtgtgtgaaggtcgtatctaggagacacggggagtggcttgttgttgccatccggaaagtcagaatttccagccatcttgggtggagatgggggagcagaacaagagcgaggtttgaattcagtcagggtgaggttgcccggtcgattcttcaggatggagattggaagaggagggacaggggggatggaagaagaacggagagtggtagcacggagagaagaacgagaagggtgggaagaaaggtgggaggggaattttccttgttgctgtgcgaacgcgttacgtttgttaagcgaaggctcaggcagttccaaggactgcgaactgctgcctgcgacactgccagaaggcaaaccaaccttaggattggtcgacttgacaggcgcagacactgggactgcagtgacagtcacgtcagaacggggagatgccagtgggttacacatgtcgggctcgtcgaattgtacgatctgggagagggtgctgcgacgagaacgagacgaagttgcagaggagggagtgtcagggcggccagtacggnnnnnnnnnnnnnnnnnnnnnnnnnnnnnnnnnnnnnnnnnnnnnnnnnnnnnnnnnnnnnnnnnnnnnnnnnnnnnnnnnnnnnnnnnnnnnnnnnnnnnnnnnnnnnnnnnnnnnnnnnnnnnnnnnnnnnnnnnnnnnnnnnnnnnnnnnnnnnnnnnnnnnnnnnnnnnnnnnnnnnnnnnnnnnnnnnnnnnnnnnnnnnnnnnnnnnnnnnnnnnnnnnnnnnnnnnnnnnnnnnnnnnnnnnnnnnnnnnnnnnnnnnnnnnnnnnnnnnnnnnnnnnnnnnnnnnnnnnnnnnnngcggggccgcggggaccttccgaatcggtgtctgttaggaaatcaagtgtcagtgactcatgttaacccttcttgcttcgaaataaacaggaagtgaaagccttcaattgaccatgtgagaccaaagtcatagatatctctcatgtttttgagtgtctctttctctatcgtttctttcgaggcatattctatgagcaaagaatgattcctttacccacaggacttgcttctatagaaaggaccaccatagagaggggtttgcctgtacagagccaagcatctgacctcaaggaatcaaccgcaataccaaagaaaggaatatgattcaaagaaccgatccatagctcaagaaagagatctgattcaaaagaatcatgccgattctatagcaaggtacccgattcccaggagccaagctgatgtccgattctgcaggcagaatggcccaatccaccctattctcaagaaccggctcaatctcacagagaagaaacccaattcccaagagccaggctcaaccccacagagaagagacctgattcccagaagcgaggctcaatcccataaggaggagacctgattattgggagccaggctcaggctcataggaagactaggttccgatgaaaagggaaaaggcccagttccatggtgtgctcgatagacacggggcccatgtccaccgaaagagacactccatgaggtaaaaggcgatgaatgcttcaaaaatgaagggaatctactaaccttgactttttctcgccattttcctgatgttttccagagcaaatggtgaaagttgtgataatggttgggagaaaagaagaaaaggaagacgtgtgtgtggcaacaacaagcgaagaggacagggtcaacaaccgcggacacgtgcccgagggactatgatgacaaccaccattgagaccgaagggaaggcacggctgcctaagaccttattatggctcatatacccatatcgaaggagccttccacgtgggcacttcatggcccaggttctctgtatttgacatactcgaatcgaagatacggacaccaacacaccagcaacgaaacgcaaaggcaaagagaatctctacctaaagaaaagctggcaaagtcgcaagtctatataccaactttccaacatgttacgcatacacaaaagcatagtgaagtgcaacaatccaagaacaaaggaagtccagcacatagaatccaatacatatgcaaagaaaccagaagattacaggcaaacaagcacaaagacagttcaagtagaatttattcatcaaattcatgtcataagtatactggataagtagcaagccagacagatccatcaagagcggccggcaatgccaacaccaacatagcattggagacaacaaaaggaaatcattaaccataagatgtaagcaaagcaaagcaaaacgcaaatgaaattcgtaaatatgaaccaggaacagataatacaggggaataaaatcagtgagtgggttgggggacacccggagaggttttatacttcgtggtgccacgcacatcccgtaattccacggatatagatcctcgaacttccaagggctcctggatacacgtgaccgtcaccgccaccgcctccggcagtatcgagaatcgacggctcaagaataaccccagaagatcgcgagaaagggcatggcaaaaatcgcaatgaaaaacaaattgctgatcgagcgtcagttaatcagcttgaaaacagaatttgcatcatgaccacaaatttcttcaacagtgagagataggagagagacacaaggaaataaaaacagttggctagaagacaaagcacgggaaaacacaagattcagtctaattggaggccttgtggcgacggaaaggtgaaaagatggccccaaagaaattcacaaagacagtgcgcaggattgctttgagccagctgtcaggtgcaccatttagagaaacagcagtcactgaccggttctgactcgacgagcgagcatcctcatcattattctttggtgtaagcgcattgtcggcatcaggctgagcgtcggatgcatttgcagcgggttcggtaattcctttgctggcctcggcggcaggctgggactcggtggcactttcgactgtcgcgaccgatggttgctgggtagtcgtgggcagttggtctgtagagggttggttgagcttgctaagaagggcttcgcggtcgccagcaagagctgcaagagcgggatcagtttcgagagatatggcagacggttggtatgaagtatagaacggtgttggcttaccgtctgtggactgtgcatctgctgcgggaacctggggctgggtctcagccttcggaacggattccttgtctgcattggtctctgctgcagtctcggattcgtggtgagcaacagcggccacgctggcgccagcaatggcggcagcgacagcagcaccagcaccaagaatctcggtgctgatgccagtatcctcggtggcttcgtcagaggcggacctagcggtctcttcttgcttggcttcgggctcagttggtgccgatgtttcgatatcagaggtggagggctgaatcgactccttcacatcagatgtctcagcgacaatctcgggctcgtctgcataggaaatcgactcagaaatagccacaacatcgacctcatttgcagaaatggtctccacgacaaaagtagactgttctaggacctcagcgttggcatcctcttgtacgggctcttcgacaacctcagcaacaactggcgcttcggctgcagcctcttcagcaacgacggcgggctgctcgatgacaacttcctccagcacagttgtctcgggctcgagctccttagtagattcctccactggagctgcctcgggagtttgctccgcgggagcagcagcttcaacgggctcttcaaccttcacaggctcttcggtaacctgctcctccacgactggtacttcagcaacttcaatagcctggatagtgggctcaacaatgacgggctcagtcacatcctcggccttatcagtagctggtgcctcagtagcagattcttcaacaacgggtgccacctcgggagtctgttcggggacagactcagcagtagactcagctgcggtttcgagaacagcaattggctcatcgatggtcttttcttcgacaacgggagtttcagcaacagcgggctcggcaatgacagcctcggccacggccacggccgcagcagcggcagcaacttcaacagcctctgaaacagtgactggctcatccacgggcttctcttcggcgacagcaggctcagcgttttgagaaacaggctcttcaacagtggcagcggcagcagtctcggtctgctcagagacgactggctcagcaacaccttcaatctcgggttgcttcttctcgaccttctcggcctcgtctgcagtaacatcagcgacggtaggagcctcggtggaagacttgatgggctcctcgacgataagttccttggcggactcaacgggagtctcttcgacaacgagagtctcttccacaacgggagtctcttccacaacgggagtctcttccaccaccggctctggggcagaggtctcagcaacgggctcttcgatggccttgtcagcaacgagctcttcggttgtctgctcggttacttcctcaggcttggtagcttccggctgctcaacggcgacttccttggcagtttcagcggggacagtctcctccactggttcttgcacagactcaataggagtggcgttttcctcaacaatggcggcggcagcctgaggaatagtagcagtagattcctcagtgacatgagcagcggcagcagctgcgggaatggcggcggtttcagtggtctcggaagcagcgacagactcctcagtgagagtagcggcagcagcagcctcagcaatggcggtctcaacaacgggagactcctcaggagtcaattccttagtggtttcaacaacaggctccgccacaactggttcctctgctgcggcctgttcggtggtctccttgacagactcgacctcaataggctcctgagccttctcagcagtggcctcctcggcgacaacggtggcaggctcttcaattgcttcggtggtgggctcagtggtggttgtctccacggcagcaacctcagtgggctcctcgacagcagattccttgacagcatcgacagtctgctcgggaatgggctcagcaatctcggtctccttgattggctcagcagtcgattcctcagtgacaggttgctcaacgggagtctcttcagccacctccttggtaggctcggaaacctcgacagtcggctccacagcagttgcctctgaagcaatttctggaacagcaacggtggtgtcagcactgttctcggcctccacctccacagtcggttcctggacagccttctcggttactggctcctcggcaggcttggactcttccacggctgcttcggtggcgggggcatcctggacggtttcagggacgacaatggtggattcttccaccgcgggggtttcttcgacagcttcgggagcagcatcgacggccttttccgcggcgataggctcagcaacctcctcaaccttggattcttcgactacgggggtctcttgaacggtctcgggggtagcctcgacagttttggattcgtccacggcgggagtttcttcgacgataggctctgccatagtctcaggaatagcctcgacgggcttggattcttccacggcagcttcagcggcgggagtctcctcgacaaccggttcagcaacgctttcggcaacagactcggcgggcttcgactcttctgtggcggattcagcggtgggcttttcttcggtgatagcctctgcgacagtttcaggagcagcctcggtggtcttttcttcagtagtaggctcttccttggtaataggctcagcaacctcctcgaccttggattcctcgactgcgggtgtctcctgggcgatttcaggggcagcctcgacgggcttggattcttccacggcgggagtttcttcgatgacagtttctgcaacagtttcaggggtagcctcgacagccgtttcctcaggaatgggcttctcctcagtgataggttcagcaacctcgacggccttagattcttccacagtgggggtttcggaggcggtctcgacagctttttcttcgctagcaggtgtagcaacctcctcagccttagattcttccacagcaggctcggcgacagtctcagaaatggtctcaacgggctttgattcttccaagacagcttcagcggtgggggtctcctcggcgacagtctcggggacgacttcggcagtcttttcctctgcggtggtttctatgacaggcttcgattcttcaactgcgggcgactcctgggcgatttcaggaataggctcctcggccttggattcttccacagcgggggtttcggaggcggtctcgacagccttttcttcggtggcaggcgtagcaatctcctcagccttggattcttccacagtaggctctgcagcggtttcagaagcggtctcaacgggttttgattcttccaaggcagcttcagcggcgggagtctcctgggcgatttcaggaataagctcctcggccttggattcttccacagcgggggtttcggaggcggtctcgacagccttttcttcagcaggtgtagcaacctcttcggtcttggattcttccacggcgggagtttcttcgacaagctctgcgacagcaacaggagcgtcctcgacagccttttcttccacggcaggcttctcctcggtgatgggctcagcaacctcagcctgggattcttcagcgctaggggtcttttcggtgacagtctcggggacggcctcgatggccttttcttctgtggcgttttcggctgtttctgcggaaggcttcgattcctcaacggcgggcgactcctgtgcaatttcaggaacaacctcctcggtcttggattcctccacggcgggagtttcttcgacggccttttcttcagtggcaggcgtctcgattagatcggcaacctcaaccttgggttcttcgacgggagtctcctgggcgatttcaggaatagcctcctcggccttggattctgaaacagctggagtctcttcgacgataggctctgcgacagcctcggtagtcttttcttccgtggcagcttcagtggtaggctcggaaacttcctcagccttggattcttcgacagcgggcgcctgggcgatttcaggaacagcttccacagtcttcgattcctccatggcgggagtctcttcgacgacaggctctgcgatggtttcaggaatagtgtcgacgggttttgattcttccacggcagtttcagtggcagtctcttccttggcagcttcaggaacggcctcgacagtctctgactcttccttggtaggttcagtgatatcctccaccgccttggattcttccacgacagcttcggcaggctgctcaacggcagcctcagcggaagtggcctcggtagccgtttcctcgatggtaggcttctcgtcggtggtaggctcctcctcgacagtcttgatttctgccgcgggaggctcttcggcgatcggctcggcggcgacttcaggaacggcctcggcagtctttagctcgtccgtgataggctcagcaacctcgggttctacattggtggaagcgacaggcttttcctccaccactggctcggcagcgggcgcagctgccttgggagcttcgactggtgattcctccacgggctcggcagaattttctcgcgtcgaagcagccagggagctaatactctcctgtctcttttgctgcttcttctttgccttcttggccttcttcctttccgcggcggtcaaggggacctcgggttgggttgcatctttggattgtggtgctgtggagtcgagcgaggcagtcgattcgctcagatctgccttggtcgcgctggcagtggatttctcatctgagaaagaaattggttcaactggtgcatctgttggcagcacatggctttccgggatcagtggctcttgcacgctggccatggtttatttcgtttcaaggtcgtaatgtcgtaaaaagatgatggatgggatattaggagattgggggtttttcacaatttgaccagcaaagatttaacgctagatttatcgtgtacagaaaacacaagctcacagagcaaaagggcaatggattattgtgagagtatgggaggaggggaaaaaggcagaaaaaaatctcagcccaaaatgtacaaaaaaaaaaaggcccgtcacggcacagctcacagtggggaaacagttggcatagtgactacatggcgcttttcctctttggtcttttcgtctttcacctctggagcatcgctggagctcgacgtccaatggccgctcgtactttgcgcgctctttcatccggctctccacttccaatatgcggtgaagctggccgaggtttattgtttgaccttctcgctttttgcttcttctggcggtgcaaccgtatgatatacagtcggtggactatcttgatacaacatctgcctcgtttcccctccttctggtggcacagtccaaacgacaaccccgtcaatcgaacccgaattgggcgctaaaaaagcgtcgacccccaattgataaaccggcgccaatggcaggccgcaaggttcttatccacctgtcatatggtccttgagtcattattgcagtgatccccaaaataaaaggacaacatatggtggatgttccattttcaatagtttctccacggattggctgatgtttttttttctctggctcagggcccatatatgcggaacactacggatcgccattctattatttctccgtacgacgcagcgcccaatttcaaggatccggaatctacagatttcgcaaaagctcgtgcctcacactagtagctctcgtgcattgcgtgctgcgtgcgacctccctaagcttgggcctccgaagccgcttttccggctcaaagcacaagcacatagctgcagtaatctgcactggcctgagctttctgcagttcctaggaagactgaacttttgtattccaccgactttcgtctactccgtagttcgtcccagcagatatatatacgcgggtgtggtcggcttcccggtcccgaagcggactccgcaggagaggccaatctaacggagtaaaaatagtatacggaggagttggaccagattgaacccgagtgttggtcttgttctccttttcaaaccccactagtctcctcccgggggggaattatcggctatcgttgcctaggtaaaatcaagtctggttagtggagtatatgcggaggcggaagattaaggggagcttgtatacgatatataaatatgaggttggttttgataccgaatgcttataccaggtgtctccatatcgactaattttaacctattgagcaagttcctcactaatgtctatgcttacactcggaccaacataattagggctttccctcattaggcatttattaggtaagtctagcccaagtgctcagctgcctatttgggaaggtacgatgcggtcagagaacgaaggttaattttcctcttggcataatgtttagacgggacaacgaataattattgtgtataactagcaaagatgtagaagctacctgaccatatgtactagaaaacgatacaaatatcaaggccatcagccacaaatagctacttcctcctcttctcttctttccaaacaccctttcatatcaaacactgcctcgtcttcagggccgaggtatttccctagggtctgtgtataatgttatgattgaaaaagaatcaagactaaaaaatgaaagaagtcatcgcctgagatccaacgggatggatggggatccaagaggcagtgcatcaaagtcaccaacggcggccatccacttctttatactgagcagtgtcatttctcagggaaatgagctttcagccaggctagcgacatcaactgcacaactaacagccatacttcaaccggagccccagtgtccataagaacagacggcccgactatacattgagtttctcgtgcattagtaccatataagcagcagccgctcttgagctagtggatactcaggatcacccgtgctttcgagaccaagaggtctccgcatcgtttgagcatacgcttggcaatcagggactcaagggtatggtcaaactcccacttgtgagacacaagactcgctgaggacaagatgctatcgttctgaaggacgatggaaatagtctctcttatgcatggaatgcggctgtaattgtcgcgggtcgatgagacaacaagtggaaccgaaacccctttaaaccattccatggcggcattgaagatcaacgccgcgggaaccatgctaatgtacgccttagctcatgacccgtagcccacctaggtgggtaggccgtttctggtgcttggtcaacccataaatccggggctggggccccaactttagccaagatcgttagtcaactcttgtcattacggagcagatattagttttgataggccatcttttgtcacagagccagatttgttcttcaccctccgtggtttgcaagatcctcgtgaatattagacgcagtacaggtatttctaaagtcggaaggagccttgccatgtatgagagacttgtccacgagcttatgaattctgacaacgaggagcattggtttctgatggggatatcaatatcaccagagtatcgtggttagatatggccggttgcaatggtgaaggcaagtggccgctcaaattatgttgtttgtatgtactaccagcggaggaatagctgaatatcccggaccggcgaaaatgcaaggatccttactcagcaaaggagctcccggtccgaccaggaggtgttctgacgctaaacccaaactggcaaggctaacccgaaaaggaagccattccatgtttgtggggtagctcaggtacccgcttctctccaccttcgccacaggcacagaactgtcgaccacggagtatataggggcaattcatattctcggggaattcaggaaggctggagagtattataggtcgaatgcgatggggacaaaggggtgatagcacgttccacaagaagtcccacaccgaaggcacataattgacacgcaactaattccaggcagcagagttaatcgaggaataagtgcataagactataatacatgctccagaacatacaacataacatacaacatgtaaatcagagatcagccctatccggggtgggtccaagcggtcagccctacgagaatttgatcgacgctttcctactgatctcccacattttattctctcctattatttctctccagagtgactgtcaactcccacatctgacgtgagaatgacctactatcaagacctgctgtgattggtcagagtcaattgttttggtcaatcaacactaaaagcacgacatcgcgtaccgaagtatatgagccatcagccctatggttcgggccttatggacgcaatatggctatcattactagccattccccttttcttctttcttcttcaactcctcttctctatagcaatctggcgagccgctggttgtgaccctctagactacaaagagccggaaaagacccgacgcaacaatggcggagactatctcgactcgagtcggtcacgctttcgcaaagcttttacgtattgatttgagtccaattccctcggtcgtcggagatgacaccaggacttatggctattacgagtgtgagcctacggtgggcgactggtttcgaggtcatacacctaccgctcctcaagttcgtcgctacgtttggggcctctttcctttcctccattggatcgggtattacaacgtgcaatggctgattggggatctcgtggcaggtgagaaactccatttgaatagtcaaatacagatactaatctgcagctcttgacaggcattactgttggcgccgtggtcattccacagggtatggcatacgctgagctagccaagctgcccccagagtacggtctctattcttcgttcatgggggtcttgatctattggttcttcgcaacgtccaaggacatcactattggggtaggatcagtccgttctttcctgggaaacaaacacctaacactctcagcccgtggcggtcatgtctacgctcatgggttcaatcatcatcagggttcaagcagttcaccccgaaatatctccaccggtccttgcttccgctctggccatcatttgcggtgcgatcgtgttattcctcggattgctgcgtcttggcttcatcgtcgacttcattccccttcctgctatcaccgctttcatgactgggtccgccatcaatgtttgtgcaggtcaagtgaagacagtcctcggggagaaagcgcatttctctacgcgtggggcaacctataagatcatcattgatacgctgaagcatctcccatccgctcggatggacgctgctatgggtctcacagcgttggcaatgttatatggtatacggtctgcgtgcaactacggaacgaggaagcagccccacaaggccaaactgttcttctttctgtcgacattgcgcactgcctttgtcgttctcttctacaccatgatcagcgctgcggtcaatctccatcgacgcgaccatcctgccttcaagctactcggtaatgtcccccgcggattcaaggctgcaggagttcccaaaatagatattccaattatcaaggcatttcttggtgagctccctgcggctgtgattgttctgctgattgagcatattgctatctcgaaatcattcggtcgtgtcaacaactataccattgacccatcgcaggagtttattgcaattggcatatcgaacctactcggtccgttcttgggtgcatacccagctacaggttcattctcccgaactgctatcaaagcaaagtgcggcgtacgaactcccctcgcgggtgtgatcactgccgttgtcgtccttcttgccatttatgcgctgcctgccttgttcttcttcattcccaaatcgtccttgtcggccgtgatcatccacgcagtaggagatctcgttacaccgccgcgtatcacctatcaattctgacgtgtatctccaattgacgcactcatcttcttcatgggcgttatcgtgatcatattctcaaccatcgagaccggaatttactgcacaatcgccgtctcactagcagtactccttttccgacttgccaaagcccggggtcaattcctgggatacattcaggtccattcagtcgtgggtgaccatatcctcaacgcatcccagggggacccaaacacagaattcgaagatgataccgaaggatctcgaagaatctacctcccaaccgagcatgacggtggcacaaacccccgaatcaagatccaccagccagccccaggaatcttcatctacagagtctccgaaggattcaactaccccaatgcaaaccactacacagaccacctagtcagccacatcttcaaagcgacccggcgcacaaacccacaagcatgggaaacaacaggcgacagaccctggaacgaccctggtccaacccgcgccgaacgcaaacttcttctgtcggaggaagcacccacttccccactcccaactctgcgcgctataattctcgatttcgccgccgtcaacaacgtagacgtcacatccgtgcagaacctcatcgacgtccgcaaccagcttgaccgttgggcatccccagacagcgtgcagtggcactttgcgaacatccacaacaaatggacgaagcgtgctctcgcagccgccggcttcgggttccccaccgtctcagatgggacaggtcctcgatgccagaggtcgatctttaatgttgcggagatattggatggcggactacctgcgttagtaactcagtctcaagtcggcgggttggaggaatggtcaaaggacttggaagttggcctgaatgtgcaggagagcagtgcctcgtcggtgatgggtgtcactgaggataatatccaggttgtgcagactggtgagagtacgaaggttaatacccatcgtcgtcgcggtcgatctggtgtcggtacttgtatggcggccgttgatggaatcaaccggcctttcttccatgtggacctgactagtgctctgaagagttctatggctgattcttaggatgcagatgctggcttgctttccgtttaatacttgctcgctttctttgactggctttagcccttattagggagaacttcaatctaatgaataagcctatatagctcttgaatttatcaattcaacatggattatttcaagctgcaatttgactaggcatccaacaactttttatatacctgttatctacgctacagtcagtttattcaccggaactctgctgggaaatccctctgagttgtagagctcaagactgacggtgtcggatctcgatcgcgcagatcgaaaactagtcctaatggcgtatagctagtggattccgatgatcttatctgtggctgaagaacggtcatgtgcacagctccaaagcacgaattactacctacaacctactccgtagactgactcagagtgtgtaactatatcatatagaatgcttaagaggatagatcgttcgcaacctgaaataatgcatctccgccatccatagcattgccaattaacaatgccgaggcaaacatgtacgttgtacacgcgaccaatgttttcaatcccggaaagatgaaacacacaaccaatgatttccagtatacgcgctggttcatattccctttccgggatgagactgacgcatctcacggcattgactcggaataccctcggtatccgatgcatccgtatccgtcgagcaggagcagctagctcccaacaaaatcaatctacagctacaggaagcatttcgcttcgcgccggaatccccactgcccggtaccggatctggccggtctggtacaacataccagcatgtacatatatccgcagcttgaagataggggacaggaacgtgggtctgtgacggaacgcgtcgaaggctacgatatacgcaatgaccggtctacatatgttgtgggcaagacaccagggccgtctgtggcgggggcggtgaatattgacgtgtgtttcgctgacagcgcgagcgcgagcctgagatggctgttgttacggcctggatcgtgcctgaaacgtgtttcgtactcggtgtggttgctgggatcagaccgcgttgatcgagggacgtgtgcaggccagacagtcggtgcgagagtcgatgttttcgggcagatccgggagggcgtggaaagtgagcgcggtagattgtcgttcctgggatcataagccgcggctcatggtttcgttctcgaggctcgcgttgggttatgggaatatatttggtgatttgggtatgtagtagtactgcgcgggctttgaatccgtgggggcggataactatatcgacggaagaataatggcttatgcgctgtccagcgcatcagctgcgagtagcgagtagcgctggcgctagggccgtcggtgcatgtgtttctttttcagccgagggcgtgagtgcggttgtgcggttcaagggaaggaagagttgactacgagttctaaccaccggggggcacatttgctcttatgttagaatagagagagtggatatagtttgagaaagagactaagctatggatactgtgtgtgtcttatgccattacggcaatactgcgtacacgagtgtacaggcgctgaggctatacaatatacgatgccaagtggcctctcgcatgacctcacgggcaggtcaatgatgagttgatgagtcgccgagttgagtattaccgtaccgtattggtatttacccgattacacccggacggggccgtcttcacttatacaacagttctgttcttattctttttcttcttcttctttactcaattgctgtagtcaattgcaattgcaataactgtaactattattattcccaattcctatgttgtatgttatatgtatatcaaccgcgttgatagctagaacacgtaactgcaccctgaatcgagcttgtgtgggtccgccaagctgcgaccaaccgaagttcccaaaaatcgaatttccgggagaaacgcgaagagcctctggttagcccgtttgggatgcttgaattcggtgcagatgcgacgggggtaggtcggtctatataagggtctcgcaccccgttcaaatggctgaatggccgtttaccgttactgcaaaggttctgtaatcttctttagggcaatccggaaagaccagatttcactgcgatagccggattacggcgggtcgtaaatccagaagtggagctgcgaaagcaaggacacgacaaccgggttttggttatgttttggtttttttggttttcgtttccttgcttatggcgtttccaatcttctgcctcgtccccccccctgctatatatctacttaagaatccaactcctgcaggtccgatgcatggcttttacctccctcggcaagcctggggaggataccgaagctgttcggagtaccggatccgtacagaattacgtattttccaaatatgaccactcggtgaggtggattcccgagggacgaagggggagacgatatccacctcatccacattatttggctcctttcagccggtggttgcccagtgactccgtagttggtggacctggaatccgagtcgggccggtttgggtgacgccgggaacaaatccaagagagatagtgggcccgagaggattatgattggagaagaggagcttggaggtggatcgacccaccagattggaacatgcttaagatccaccgcaagggttggattattgtgattttgattttacgattttattattttataattacaacttgtatttccattttcttctcatgttatccctttgtgcaattcgattctacaattggtatccgtacaccgtactccctaggtccaatatattccatgtacatgctaggtataccgctaaaccttgaaaccccatgcaggggatatagataactcagacccatacccttcgacgaatcacacccagtggacccagttggaacaatacccgactgatcccgacaggtcgcaatacgcggtaagaatgcccattacacacccatacgcacccccagcattcctcacggtgtattctgcgtatcagtccacgcacaacttagggcttttttcttaccttacacagacactaagaccgactaggaggcggacgggcgaaaatttggccgtagagtatttatgtcctagtgagtgccgtctcccgtagtttcccagctttttctccctgaaaagtccatctctctcctctttctttctttctcctctcttccacccaccctataattctataaacccatccatcgcaatggccacctctcgtgtcttcgcctcccgcatggcctcggtcatggcccagacctccaaggtcgcccgccctgctgcccgcttccagctcaacgctgccaccaagcgcaccttcacccagaaggcccccgccttcggtgcccccaagcgcatccagtcgcccactctcctccaggccaaggctttccagactgccgcccgccgccagtactcctccgaggtcgcctccgccatggttgaggtctccaagaacatcggtatgggttccgccgccatcggtctcggtggtgccggtatcggtatcggtctcgtcttcgccgctctcctcatgagtgtctcccgcaaccctgccctccgtggccagctcttctcctacgccattctcggctttgccttcgtcgaggccatgggtctcttcgatctcatggttgccatgatgtgcaagtacgtctaaattatctacgactcgggttttcggattcttggaaaaatgtcatcaaaacaaggattttgggttttttgagagaatctctttttctgccggggagggtatttggtcgtgatgtattaccatgtactactttcagcgtcatctacaacacttttctttctgtacatatagagtcctatatggcccatcgaccatccaacctatcaaagagccaaacgaaaaactctgtgtgttgcgtctgacggccgtataatattctctttccttttcctagttcttccccatggggtgagattgtatgtataacgcctgaatgagttactttgctcccaagctcagaactccacgtagacaagctaaaagctataaacccggggcgatcctagctcgatcttgacaacaaacagctggtctttttggcgcttgttatatcccgctctagccgatgttgctacgggtcctgcagcattcgacccgctcttcaacttgcaactacgccagaactaccacccattggcctacaataaacggcgagagtgaactacagagccttcacaatgtgatcgagctatttgatcccaaagaatcagtcctggcggttcttaatgagcctgagaccctcgacgcaagattcttagctccgggacctcgggaacggctttcccgtagtcagctgactcaacctgtgaccgtgacatcagcctcggattccagggctacagatcgaggttctgcatgcagcatgcagattgaaggtgaagcaagtcatatttcattgcgaactaggtgttttgtgaattcgctattttggggttggggtaaagctctgatgctcggcaacttccccgtttatatctacgaacccggtctagtccgctttcagttagtgacaatatcaagtatatcttggtgatattaatgagatctcatggatacttctttttgtggattatatgtttataccttggggggttttgtaatttggtaaaggtccaactgagcaatatatatactgtctctaggcttggtttttgaggttcaatatatacattggcgactaccaaatcacatcaatcttgaattatttttctgttattcttatttttcttctgtttaatttgggaaatacaagaatagaaatcacagtaatcaaaagagacttagactctaatcatcattgaggcgagaagagcaatacacgcgttaatacacccagccgacatgctcacactcctgctggaagaaaaagctcaagtgcatcaataaatatacttcatatgaataagataagaccaatgttaacagaagacctgcaagaacgatcacgaaagactccaaacatgccataatcgctcgataaaccgataaaaccaaaacgctgatggggaatatgtatcaccaggactcgaaaagaaagccccaaaccccaagtgtaagcgcatcaaagcaagccaaaaaccaagaagagagcaagacacaccagctagaaaatttccagatcctcaaactcaaccaccaacccatccgccgaacccgttgccaaagaagcatgcatatcatcccacatcgcaccagcccgcgacagacccgtcggccgactcgcataaaccccaacatgaacaaacttatcttccaccccataaaagaaccacgtcacctcgcgcagcttcttccacgtattccccaccgcaccgggcgacagcgcgaacggcgacgccgacggaacctggtaccaaatccacagcgcgtggccgacacgctcgagcttgatacgcagcgagtggatagccagtccggcctgagccgactgcgccagcggcgacaaacaccagtccgcgccatcggccgtcgcgctcaccgacgacgcgttcaccgttcccgacgagaactccattccggctttgacccatttgcagggtgagcgcggtgcgttgcggaagccccgcggtccgtcgacttcggaggagaaggattgcggcgcggcgccggcgaatattaccagtccgccttggtcccattccagttcccagtctgcgctcacggtcacctctgctacgacgaaggcgtggcggagggatgtgaagacgattggggcggtggaggtttcgccgttgggtggtttgcgccagaggtctgtgtttggacctgcgcggagggtgaagtattccatgcactggggtagttcgaatgtcggtggcaggtttagtgccgtgaaggttgaaccatctggaggcatttttgattttgagattttgggatttcttgaattgggtctccaccgttcttaataggtgggaaaaaggaaaatagttgtagagtcacactgtgtggtgcctcgagaataggaataccccggatgagctgcagttgatcactcttaaatccttcagcgatgacgctggggtcacaacatttgcctctaaagtttaagcaggcgcactaatccgagcaaagcaaatcatgcacgatgcatacgcatagaaggcagaaaaaaaaatcttgggatatgatgcagtcgagaattgagatacgccgaatgcgggttgcgccagacctggaaatgggaacaccgaaaaaaagcaaaaggaaagtaaagagaatgagaaaaagagaaaaagaaggtgattgaatcaattattatggcttgaactacgcagtacttatatagcgagaccaaatgtcggcttccccctaatggaattcaggggatgatctgctcatgtccggccggggatggccgtatcaaggaagccagaaccagagtgctggggactgaaccaagctgttgggctccctgccgcgctagagtcatgttctttatggtcgatttctttgaggccctcgagaagcgtgcttgcatagcttcggcgacagatggcctgcgggccagttcgcaagtggcgggtcaccatgcatctggggatccatcacgatgtgacggggcttctaagaggagcatgaaaggtcctttaggcccaaaggacacaaggggcatacagaacaaggaatagggcgaatgtgtgccgtggacagctgtccgggctgaaaatgaaagaacatgcagtcgagaaatattttcatcatccatactggagaaattatacttcaacatatcgaggatcgatcggaacaatgcaggacgcatgaactgggtggaactcagattcgggggagctgagaattgtctagggatcttccctggtcggtggtttgacagcttacaggaagggcaaaaaggcttctgtttttattttatcccgactgcggttttcgctctccaattaggtgttctgcacgaggctgaagagggtaatcttggatgtttcatggggatcctggaccagatgtacaacattctaagatgtaagtgtaagtgagatgtaagtataggatagaagaaggaacctctgctaaattgtccacttcttctatatctcttgtacggagtatgaagatgaagtaaaatctaatcagctaacctgtttctttttatagaaggccttggcttgtgattgtttcttttccttcgtactttcgccttaacggtgtgtgttggcatcttcgggcgcaacttcactattcttacgcctttctcgcctttctcgcttaacaccaaatacgtctcatccctttctcccttgaattccaactcaaagaatacgccccgcgctagcatgcgaatatgcacggggcgaagtgcaggtcccaaaaagggggccaacccccgagaagcgaagccaactcgtattttggcctggagctcgccctcccaagactaactcagggctttggaccaatcaaagcagccccattgacatcttggcttcgtatttgaagacccttggcctcaatccgagcaactgcactcgtgcggaggatttgcttgagccccctgatccatttatttaaatgccatccatttcgtaaaatctggggaaattgttagatcttagatttccccagagctaagcagaacaaaacaaattgcaaaaatggcgcctcgacgcggcagcggaagctattccagctatgtcgacgataatccgtggagcgacacgacctggctgtcactggagcattactacccggacgaatacaagcctctctttatcacccaatttgtctttgatatcatttccctcctcgcgttcgtcgccttcctcatttgggcatgcagaatcagaaatcgtagtctcccgctgaaagcactcatttgcgctctgatttcctctatatggtatgtggaaagatctggactaaataaacaatccgctaaccagtgggtcacagctgccaaataaacatcatcgcctgggaagccctatatgtggctgaggcgcaggtgacgatgtactatttgatcagcttgatgctctgggacttattcaaagtcgttgcgatctgcctcaccttctatgtcttctggaacctcatccatcgcctcctgggatttattagagtctccggcaagccacacgcggcagtgaccaccatccattatctcctcctcggtattattttcgtggcctctcttgccgaatggggcatgtgtgttgcttcttacgtgcgaagcgtggtttccactctcaacgccgatatgcagtggtcctggacacagctgaatgtcgcggtgtatatcatctattggctgctgtcattggagattctcgcctggggaatcttcctggcgatcaaggctcgcagctatgctttctggtcaaaggtgaatctcactccaatagtttctatggtatacaccaactaattggctatcagtcgcccgctatggcactcgtcgccgctgccatctcctggtgcgctgtgtgttccaccctggccatcatttacattcgctatagcctgatgcctacctctgcatatgactggccgatatacctggacgccgccagaactattgtacagttcgtgctctgggtcggcacttacactggtcttctcctgtgttgtgcgaaatggcacaacctcgaccaggggccgaagtatcccgcacctgattatcagtctcagttccccgagggacactaccctcagattcaacagccatatgatattcctccgtacgtggatcattcaacacagcaccaggcccacccgcaccatgtctcgacctagtaaggttcatgttaaggtctgattctgctgaggtctactgattgatttcctatgattttgactttgtgagagtttctattacagtgatacttcttttaatgtgtataccgaccgtttaatgttgatacccaatacgatgcgaatgatagcaatgcaatcctttttgaacaaaacattgtatgaagcatatttccagtatgcctcaaataacaccctagaacctagaaaaacacaataaaccaaaaaagccactcataaaacatgaagaagcaagtagacaaaaacgtcttggcagaccaggcggtggcgcaaacccgcgacaacatcatcttcattttcgccatcaagccttcgctcgatcaacacccactttcacatctcacaaaatggtctgctcaaaatgccagaagaagctcaaagccactgagctcgccacccccggcgtcaagcgcaagaacgacatgtactacggctcgccgtctagtacactcggtggcggcgcagacaagggaaaggcgaagccgacactaggcgccacgggaatcggaaaggtatgttacagaattttctgtttgatactttgaattaaggagaattatcactattctggataagttgtatactgacattccctccagagcaagctcctcagcgcgaaagcgaagaatccttatgcggcttatgcttcgtcttgtgataactgcaaggtgaagacggagatagggaggaagttttgccagcggtgcgcttatcagaggaatggtatgttgctgtattatttgccctttgttcgttgcatatgctgatatcgatactagcctgtgccatgtgcggcaagaatctggcggggaagtcggtcaaggaccagcctattgtccagggacagaagttcaacatggcatgaagtgcttgtgggttagatctgggcgattacagccttttattttctgttttacattgcatggcgttgggcgttgacgataccgcggaatattagataaacatcgatattgaactgaaatgaacttgatttgacagtgtaggaaaattctagttatacatggcatgcgcaataagagtatatgcaatgcgacaccaatggtgcgctataagatcggaacaagtatgccttttcatctcctgaagaacattgaacctcgcgttctccttcccagctcccttcatctgcttccatcacctcttaacggtcggccagcatgttcttgatgttactgtagtattgcgtgttcaagtattgcgggagctcctccttggcgagccacttgaagtccttgaggccctgggtgttgacggacagatcggcctggccggccatcatacgagacttcaaaaagaagatcttgctgccgggaacctcgatcttgttgcctgccttcttggagtggcgggggttgaaggagtgccatccgaccgggtggaaaccgaccatccaggtgttcatgttgacaccggcggactgggcgagggtgcgttcagcagcctagagtaaaatagtattagtatgattcctaaactcaatgcggttcaaaagtatagcactcaccaagcgaagggtctcgcccgactctaccggcgagctggggaacttccagtgtccctccttggactgaacaaggagataaagagtacgggaaagcaaacgatcgagactcttttggtcgttcttcttgtctgcctccgtgatccgaggatacggccgaggaatttcttcctttttgctggtatcttgggaagtcgcattggcagtggattctgcgtcctggacaagagcctcaatctggtgttcaggctcagactcctgtgctcctagcaggagctcgtcgttccatgcatcgctgtcgtacgcgttgtaatgtccgatatcacgcgcggcagtccggcgctcctggatcttcttcttccagtcttcgtcggccggtgttccgcgtttgaagtagaaatatttcgtaaagggaagggcgagacgctcattcagtcgtttctggtagaaaaagaacgctttctcgaacggttcgagttcacgggtgatttggggagggcgggagaggactacaccagcgttgatgatgtaggctggcttcacggcggagtcggccgctgttgatgcggaggtcgattcgattgctggtgctgccgaggaatagctgcggcggctaatggtctcttgacagcttctgcacacgccggagtcgactattgatggccctgcgcgcggagtcagtatcaggaatccgggcaaaaagttcaattggacatacgcaatagcgaggccacgcgccgtgcaccattagatcctgacgacatcttcaagagtggaatggcaatgtgtttggggctgatcggtgtcttgtctccccgagaaaaagatccaaccaggtcacgttgtcgccaggcccgattgggattagtcaccgcccgggcgctttaaatttcaaaattcgacttccactttcttcccttctccaagcatctcttatcatcactgcgtccagttctctacggccggttgatcatttaaaggtgctcagagtgagctcctcctgagatcgcggccaattttcgctagcggtaccttcttaaaaaatcaaggcgtactgttagatagctgccgcgaacatccccttagtcttacggctgtgtgctttgatagaaatccatttttaccattttaccttcattcttttctaatttctcctccgcaagtatttccagaaccaacacctaaacctcccctcaaatctccaccagcagctcttcctgttttggcacctctcttcctagttgcaccatcctctcctgtgtaccgaacacccgcagtatgttgccgtaggtatcccagaaggcatctccaaggcgcgggagtaatttgccctgatcgaccagacgagcgatacgcccggaaccagtgtcggctagggatgtaccagcctgagcgatctgggctgcttgaatcaatgggattgtctcggtgtcaacatcaaagaagttgttgaattccttcttggtaacagcctggttgttgctaggctgtgccatgataccggcaaccaaactgggtgctgtggtcgttggccggcgtttgatgcgttgtatattgcctgccagtttgatgaaggccatggcggcaagcatgctatcgtatcctgcctcatgggtactcttacggaacttgtacttcgcaaagcgagggtcgatctctgcaaaatgattagctgtgctcgcttgctgtcaatgatataactcatgtcctacctatcttggggctttctattccagctaaagtcgtgttgagatcttcaagcgaagacatagggtttagagagccgcagtcgtgagtggccatgtacttggtatccgctagcacggggaatagctcgtggatggcggtctggaactcggcgagggtattcggcaacggacctaagaagcatgcgtggaagaagagcagatcgcagaacatgttgtggccgactagaatcggtctgttctctttgagccgactcttcactttgtctgacaactgctggattccgaaagtcggctgctcgatgaccttcatcagaggatggaaagcgtctgcttcaagttcgtccaggcttccactcacaagcgcttctgcgatccagcggaacccgatatgcttccggattcgttcctttttgaccttcaatttcgcctccaaggtagactgctcattgcatgggtcccgcaattcgatctggacgaacgttgatgcaccccgcgacgttaagttggggtattcgtcgctgataaggtggtgtatcagccatttctgcatgctagtcaacccggtaggtatgggtcctggaacaagctggatgctgctgggtggcggaatgttgagccactcgcggcgtttctatatatgtcaattgatgtattcaaatcaacgtttgatacaacatcttacctcgccctgtgccagccactcattgacactgacccgaacggcctcaaggaactccagagattcatgatcgtctttcttaatatccacaacttggacagggttccgttggcatttctctgcagctcttctgattgccaattgttcttcctctcgagataggtatcgaacaccgaaggtgcacatgtggtcaatgctgaagtggttagcaagcaagaattccattgctgttcagggagatattagcgtatgctcaacatattgtagatatcggacatacagcggcttccgaatgtccagtcccgattcaaatccatctcacgctgggtgattggactcagatttatgttgtacggtttcagggtgtaggtggctatagatggttagcgggacacgtcttgcactagggttaatccgtacctttttccttatcttcatgacaagttgtcagcccaacttgaagaatctgataccgctctgcagccaatttggcttccacatatcgttcctgcacagtctggggccgggactgtggtgtactggatttgaaagccaccccagacagctcgaagtctacggacacgaagcagctggtggagatgtcgttcagtatggaggataggcaatcgggaaaggtgacagccgtgatatccatcttggttcaaagttgggaacagcaccgaagtatgagcgtagtgaatgaagataagaggtgaaaaggaaagagttggctttgttgaagtactgattgctagacaaaagaagagtatgcattaggaaggcaggtatccgcgtttaattgatcacaaagagcactgcgttgcgtgtagtttgtagaaagggtgatactttgtcgacagtcgacaggatgatatagcttgaaagtttactggtctacgctgttgagtctgatagaccagagttgtgataggagcaaagaagaagagagagatagatgaggaaatagtgatataatatgtataaaaatttgaagcatttaccagattctggttctctatagatagcaaggattgaatatgcatctttttgtcaagaaatccttcgcaggttctcaaagtacattctctattgcttcagaaatacagcatatagcttcacaagcaatatctatcttaaccctaggagttagctcagttggagtgtataaatgaccgaggcaacatcctggcgatgtttatgtccaattggaatagcacaggctgttacctgcgatgcaataaccgaaaaattgggaaaattggcctagagtaatatagaagtgaagcgcctctttttgaacctgtctagggagctaaaataatcgtgaattgagaagtgagagagtaaacaagcctacctgaggctacatagacgatctcacaggccagtcccgtgactgaccccggacttggacgagccgagggaaaacgagagagccgatcacagacccgacacgctttacttccaagcttgaagtttttccctttataattactgcttatacaactttttgaagatcgaatttgacctattacatctcggcctccccaatggcgaacggaccctctgcgtcgtcgcgctctcacgccccatcctcagcttcccccacaaagttgtgctccaagacatacaagaaagcctcccaactgtatctcacacgacgcttaccagaagcgctcgcaaatatccaaccgattatcacgccttcagtaccagaggaccagcaaacaaatggcgacagctcaacacctattgcgccgattgccacggccgctggcacgtggaggatcaaggtgtggaacctctacatcaccctccttagcgcaatagtcgatctcggtgcagaggagggaaagaagcaatttggtcagaaggagtggaaatcaattgcgtcgcaagtcagagaaggtgcgatttgggaaactgtggtcgaggtcggataccaaggccacgagggttcggtggatcccgaagtggtctacaacctgttagtatcagctcactttcctgcctaaatcgaggtactgacaacgcgatcctagtgctaccctccttctaacccactcctcttcgcaatccctgaaccaacagcgccttgagacctatctctcttcctacggacaacccaacctcgacctcgcaggtcgcctacacgatgcttctgatgattacgagcagcgccctattcgtgcgacaagcggagctgatactccgaaagatctaaatgccagagtaaagattatcgagctctttaccttgcacgtcctcccccgcaatgacgagtgggaatactccaccgaatttatcaatttgagcgaagtcctcgatgaagaacgcaaagaactcttcctccagacactcgagggcctgaaggaagagaaggagcggggtgaaatgcgcgcagtcgaactacagcgagccaaagatgtagagcttgaacggaaacgagaggatgaacgtcgtgaagccgaagaagcagcagcagccgctgcgcgagtacagtctagtggaaataagcgcaataccagcgaagtcgactatgggatcgagaaaaaccgcacaaatggttctcccaaaggcaaaggagccaggcaaccgacagacaagtcgccaaatggcaagtcacgagctcccgtctcatcatccagctccaaaaatgtcaaaaagcaggacaaggctgaaccccggggtcgcccaactcaggccgtggccactggcgtgcgcaacatcttccgtcacattatccgaactgtgtctgggaatcccatgtcaatagtgcgcatcctacttttcttgatcggaattacgatggcgatgagcaggcagggtgtgcgcgatcgcatccgacggattacagacggcgcttggcaaaaggtcaaagctacagccggaatgggagtcaaagtgagctatatctgagatataagccacttcgatctctacgcacattgcatggttattctgtacatttttcttgatcaagttggctctccatcattcttggaggttatttttgcataatgtttcttttgtgattccctttgtgattctctatgtccatgtattctacacatgcataccaccgggtgtggttgaatttacttataagtccgatttcggtttgttttggccagctattttcaaaggtaatcctcgtaaagtgcctaggctcattgtccagtacgtggcccatcaagacagtaagagatcgctgagctttgaatgttgttatgtaacctagctattctgaataggagacttgaacaatcactggaacatccaaagcctcgatgacatcgaagaaaaacaatccaagactcctcaccgtcggaggaatgaaaacaatattatattctaaacgggtatcaaatagtcgtacgctcatgaacacgtcctgcgtgatccccacataaattttcagccataccaatctcaacatcatcgcgcgtagtgtcatccaaatcctctttctcgatgactctagcatgccaccaccggaacatctgaacgaagaaatgcgccacgcagatctgctccgtggtatagagtagtaccggcaccgatgtcttcgcttttatgaagagatcaactggctgccacattgcgtagagcaacgggataccaagtgcggtgctcttcgctggtccgcaaaagcaaactgcaatagtttcctccggagacatgcgctcgaatatgggcttggaccagcgtcgagagctgaagattcgcggtggtctggagcagaagaagcatactgccgttaaagtgatgtaaagtaggatgttgaataggaccacgaagattatgctctgcgcggaaaaggtttggagagctcctgttgcgaagcaggaggagaatgtggccctgatatttaagaatgcgggttagaaagaccaaaaaagagggccaaggctttcgtatagaaagctcgttgtactcaccagatcaacaacaataagcagacagtagacaacttaggcagcttggtcttctgcatgacatacgcagtgcgatcaggccaagtccacctcaccacctgcccaacgaacagtggcagtaacacactgagtcccaattgcttgaaaacctccctatacatacttcccaaattcccacccccataccgccagggatcaaactccgccctcttaggtatcaacgcaacagtccaagcagccgtaacaaacgggccgagaatattagccaacaagacctccaccaaagcagccgcatcatctccaccggcagacctcgtcataacaacattggacgcaatcgtcgtcggaatacaagcagtgaagatataccccgccagcaccgcgcgatcaattttactccccgtatcggcagcgatgataatatgcacgatagccagcaccagcgcaggaataaacagaaacgaaaccgcctgcacgatcaagtggagtcgccaattcagcacgtgctcgataagcttctggcgcgggatgctcaatcctgagattaggaagattatcgcgatcacgccgtacatgatgctgtattcggagcggatgatgcctccatgcttggccacgtttgggaagcagtatgccagggcgcacacgacgccgatcccgattaggagccattggcggaggattagacttgcgatgcgcttcagggcttgctgccaccgtggctgtgcgatgtccggggctgcttccattttctttttagtctaggaatgatggcatgggtattgtaccgccgtggatggattttggggtatgtaggggatatgtagggggaaattttcgtgatcggggtaagtccgacccatcggattcgatagcgcgcacaggaatcgcatcatctgaagctatatgttgtactattacaatgtacatggtggtatccatcatggataagtgtatattttgcatctttgtatgttgtatatcaaatctgggaatccaaaacgggttgccgaagtcgggtagccgatgtcatcaatcgggtcgaatggcaccggagacatattcgtaatctgagtcaacatacggaggaactagatcatgctgacactgtcagtttcatatcttgtataattcgttatttggtctgtccgaggtaactagatctcttgtactccatacaacaaagtccgaacaaacgccgtgcaaatgccactataaattcgggaaaacgttcatccgatcaaaatgacgctactatcaacgtcactgccgcaacaccttgcccatatatacattccaacaactgaacccctgactataaacacaaagttcaagcctgcagcaagccccacgttcaacgaaccttggaatactttaattatctgactcagaacgtcccatgaccctttctggggatggacctcggctgaggggagatctcgcgctggtccgagatcacccgccagcggagttcgatacttcgctccgaattgtaagtcccgaaatattcagaatatccccggagtaatgagctccctggagaaattaggcttttctggactgttgtactccgtagtctacgggtagattgtgtataagatgatattatacattgtaactagtcgaacaaggcacgggcgttttctgtactttctctccccctacattgtacgatgtaatctgaatctcaaggtaccgagtataatcacaagccgtcaacgtgataacttggacaagacatgtgaaatctgatcattaaaaatctggggtcattcattccgctgagaagagagccgcccttgttgccgaaggcctcgggattgtcgtgaagcgccctacattttgtgctcggtaccaaataggacataattattatacatatagagatctcccctcggcaagtcctggatctgtcacctcttttttttccctttctttcttctctggtcttctcatctgtgcgtggtcatacttccgttcgtccagcttcctccgcttccccgtcatagctccccacaaagtttggcaccgttgccactcgccttgaatcatataccctggaacttcgccttttctttcctgaaagattaaagatccttgcaattgatatcttgatctttctttcagatataccatctcttccaattgttcggcttatctccggaacggtatacttccgcacttctccacattctcggctttttctcgcgacaatcggaacatctgcgaaacttgattaccgacattgaaggattcctgtgaaatctttgtgaacaaaagtgcaatttctctacagttatactaaaacatatcgaaacaatgtctgccaaaaatgtcaatcagcagaagcgcacatcgcctgcggtcaacttgatcggtatgtagcatagactcactccccctttcggggtcgtgtacggttattgacctatgcccgattagctggtggtggtgccggtatgatggaggctctcgtgtgccatcctctagacacaatcaaggtccgcatgcagctgtcaaggagggccacagcacctggggtgagttacggaatttgccattcgacaatcaaaagccattgctaaccattttcgctggatcaggttaagccacgcgggttcgtggccaccggtgttcaaattgtgcaaaaggagaccgctatgggtctgtacaagggtcttggtgccgtgctgggtggtatcatcccgaagatggcgatccgattcacctcatacgaatcatataagggcatgctcgccaataaggagacaggcgccgtgagcagcaaagccactttccttggtatgcgaagcgttgaaaaaaatcgaaaatgcataatggaaagctaacaatccctcatagctggtcttgccgccggtgttaccgaagccgtggccgttgtcaaccctatggaagttatcaaaattcgtctgcaggcccagcaccacagtttggccgatcccctggacgcccccaagtaccgcagcgccccccacgcgctcttcaccgttgtcaaggaagaaggcttcagcgtcctctaccgcggtgtctccctgaccgccctccgacaaggaaccaaccaggccgccaacttcaccgcatacacggaactgaaggctgctctgcagcgctggcaacccgcctacagcgacagccagttgcccgcttaccaaaccaccatgattggtctgatctccggtgccgtcggacccttctccaacgctcccatcgacaccatcaagacccgtctccagaagacccgtgctgagcccggtcagtccgctgtctcccgtatcatggtcatcgccaaggatatgtggaagactgagggttaccgcgctttctacaagggtatcacccctcgtgtcatgcgtgttgctcccggccaggctgttactttcaccgtctatgagtacctcaagggtaagctcgagggctctaactggtctttcgttggtggtagctttgatgagtaaatgtgccaaaatgtcttgttgttttctggaaagcattgtgatacctgacttggcatggtgggagttgcattccctgtttcgcgcattggactctggaacagaactgttcattgcaagccgcttgaaacggctctttgtgtaaatattttgtgctttgcgttagttcttttctataccactttggtgcgccttgagctgaaatagagaatatccaaaaccattgaagagtcgtttgccagtgtagtaatttggtgttgagggtctgtccatgaatgacccggttgtagatacaccagtcagcaatgcttgtgtaacaaccacacaagaacatattcctatcgagttaaaataacacaagttttttctcctttctgtattatagactcgttggatgtcgaaataaagcccaactgggcagccctgacggctgacaacgcgctatcggcccctcattattcaccgcttctcccctcataaataacaaccaaccaaccgagctgcatcctacagtgcagcatcatgcagtcaggaattacaggtgagacattcgaattatttgatcttgaactctgaaaaacccccattgaattcaacactaacaaacatctagtctccgcggagctgaaagatgcattcgcccgcttcaactccgacccctcaacattctgtctgcctgcaactattacagcagagaccctaacgccgctggccccaatctccttccaaggaagcccatcggaaaatgccttcttttcagccctcccccagctgtcctccgtcctccagcctaagacccccatctacctccttctccggcgcccatcgaccgccgcctctaccgctccactcatcgctttgacctatatcccgtataatgcacccgtgcgagcaaagacgctctttgcttctactcgctcgacgctgacccgcgagttgggcacggagaagtttgcttctaccgtctttgctaccgaggaagacgagattctgggccaggatgcgtggcgcgagcgtgatggcgagggccccaatgctatctctcgtgaagatatgatgggcgagaaggagagggagctggatgctgttcgtaaggcggaggccgaggcacggaatggcacccccgggagagatattggcattggtggcacctttggacctgcctctggctctgggatgagggtttctctgccggttcacgaggaagctaagtctgcgctgagggatctacgccatggtgggttggtacaactggtaagttataccctgcctcgtccggatctgtgaaatttgaggctaacttcaagcagactgttgatatccccacggagaagatcgtcttggcccactctcactctgacgtcgaggcacactctgtcgccacacatatctcctcctcttcgccgcgttattctttctatcattaccccgggtccgatgtcgtgatcttcgtgtacacgtgtcccactggatcttcgatcaaggagcgtatgctgcacgctagctcgcggagaaacgccatcgcggttgctgagcaggaaggactcaagatcgagaaaaaggtatgcgtgccccgttgtggatggtcgtttcggatgctcacaaatagcagattgaggcctctcaccctgacgagatcaccggtgatcgtttgcaagaggaagtcactccatcacgagaccagggtcctgcgcgaggatttgcgagaccccgtcgccccggccggtaaatcgctattgtatagataggctatattcttgatgagaccagagagcctccgatccgatagttgtagtaaatatagcagtactgtgcttgactcgccaggttattgtctgaaactttggtagattcttgttctaccagcaaaggtagaattggatcaatggttagacattgatcggatcctcatataccccttgaagcgtacaattctcacagataacctgttcatatttgatgtttcctggatatctgtagccgtggccagttttccaaggcgtctaatatgatcctcttagttattcttggtgtaggttgtatgagcaacagaaagaatcactcgaggtcaccaagtgctggacacatgactggtgatttcctaattgatttgatgagctcgacctggaggtataaaagggctccctccccccaaatcttcctcttctcttcttctctcctccacatccctctgaacaccatctctccgtagccccatgagatagggtcagcagagggtcccgtagcacatgctgcctaacccaccacagggacatcaacatcatcatgttgtggaagtccatgtaggtcagcaacaaatatcaaaccgggctttctcgtggatgttcctgaagttgtggctcacattgccacttgacgagtcccacggaatacatgaagggtgtaaatctccgtagccgaagacttgtaggtagtcaccctggcagaggtagtcacatcactagagagaataattgattgctattatactgatgtccttgccatgttgaagtagtttgggatgaagcatacgtggatatttgttatcatattgccttagacaatcctactgagctctaggacgaatctcacgtacacatatcaaatcaagaacgaaaactcccgggtatttgtcagtgtcggcctaaagaaacataacttggcatgaaaaggtcgactatggtcgactataaactaataaatcacagtgtcctcgttatcctcaacgacctcgcctccgtcatcatctcggtgggcatcatgctgatcttgaacggcactttcctccacgttggcagtgacttcgtctgttttggctggatcggaggtttggcctttggtgtctacaccgaccgtatctggagcaccttgagctgtttccttagactttgaatctgtcggatctgcctcgtgctctggaaccgatggctggtcttgatgaccacctgtttgctgctgctcttctgacaattggggcttttcttcgcttgcaggttgttgtgtttcagcctgagttggttgtgtctcagcctgagttggttgtgtctcaaccagcattggctgttcgggcacaaatgcctctggtggatatcgggcttcaaactcggcgacttctcgggcaatagttgcctctgcttcttcgatttgttgttttaccgttgaatcgtcgccaggtcggggttgccatggtttgtaatactaaaatgaattagctgatggctactataatatgaacagcataactcaccagagccggctctgcctgtgtcttgaagaaatgtgccatagcaagcatattcgaatgccgtgtttgcatctgagaatgagaagagtcagtaaaaacttaatcaccatatacctcattggtatgtaagtggatagatcatgaacataccgcttctcgctcatacagcggagtttctcttctgcgaatctcatcccgctgttcctttcgccgtttcttcaattcaccgaactcggcatcctgtgatttcaacttctcttgctgctttttttcaatgtcagcgcgacgtctctgtgccgcggaacttgagctctgcgatagagtaccaagcagccccccgaataaccgctgaccccgcttgcgatcctcatctcgacctgtgcgcagtcgcgtaggctttttctccacagactcatctgtcgcaggtggaggggatgacggccggtgccgctgagaatgcggggaggtgttgtctgtagagctgagtcgtcggcgcttagtgtcgtattctgcagttgaagactttcgtcgcttggctgtcaactccggagactggatagtatcctggttgggaacggccactgcagaagcgagtgtctctgggctgtcaaagtaatatgcgcgttagctagagcgctccaattacaatgcgcgcgcgtgggttgtacggggtgatgaaagctacatacccttcagacatggtgatcggcaaacaacgctggttgtaagaaagaaacaaactggtggaagaaatgagcgacgttaagtgctccgatccgggtcaggtattggagttgttcaagaggcgcaaaataacgagacatgttgcatagaatcacattacttggagtcacgtgcacctaccatttagttggggcgttcaccgtcggcttttctttttctcctcttacttcccagcgagtgccaaatcatacttcattccactttctacagctttaatattctcattttcctgttacgccactcaaatcataatgtctcgtcaccaccccgatctcgtcatgtgccgcaagcaacccggcatctctatcggccgtctgtgtgacaaatgcgacggaaaatgtcccgtctgcgattcctacgtgcgccccacgactctcgtccgcatttgcgacgagtgctctttcggaaactaccagaacaagtgtgtggtctgcggtggcgagggcatcagtgatgcgttctactgctttgaatgtacgcgtctcgagaaggatcgcgatggatgccccaagatcatcaatctgggaagttcgaggacggatctgttctaccaaaagaaaagtttcaggaatcaatgatcttcaagagaggcttgtggcttggtgtccaagtggaggggagccaagcatgagtccggcgggtttacaatgttcagcctaacgacaaaatgactacaagctttacaactgcgagcacgtgaaaaacatcctgtcggtggactattcaaacctgctccgcgaatgaaggatatcaacgaacattcggacccgaatacaattcaacgaaatatccctgtgcctcggactgcttttgcagcatcatgcaacaatacccgacaagctggcaggcatggtggtaacgcgcgctgtactatcaaacctcgaggattcgcaatcaatacagacgatttggcgactaggaccagcggggctctaggtggagcagctggactggaagcaacacctgcagggttcgtgactgatatgtctcggtctcggtcatgtttcgtcgattatccagatgggtatggcatgatccaacccccaaatatgtggcttcaaggcggtcttcataaacattatgatgggtgggctttgattgagggtccctatctccaattccaattctgaataaagccatttcccatgcatataaactttgccactgtgataacttccgtctgctgttatgtaataatatcttcgacttttgtcaaacttgatccattctccgtctccgtggccacccatcctttcttgaacacctatgatcttatcaggcgtccttccttacaatgacaatcgtctatttcgatatttggaaagtactggccgcctagaatagacgaagaaaatgtaatttgcaacaactccacttgcacagaaacatctgtcggcgtctgtatgttggactgtttgtaactgggaaccactttcatcagtcgttcgagcattaagatgtcagtctcaagtccagccactttcggaatctcctagcgacctacctagtccgttacatttttgcatctcttcatcgtctaactttgagtgctggcagcaatggtgcgtatattcggattagagatattggcaagctgggtcgtttcctacgaagcagcgcctctcgaggaaggcatgaatctttcctcacccgagcccaatgcaaatcgatattgctgtgctagccgtacgtctaagaatgaacctccaatatatctgtgcactatgtactccgtgcatacaacatagaaggatgtagggtttatagagtgtcttggcgccccactaattgtttccaacgtgccgaggcacacctaagaggggtatgtcatctctccggcatgagatcctctccgggctagtttcatgcatgattatatatcttttattactctgacgccggttttccttttgatctgtatcggtctcaagttgtatagatgtatttatcgacttcacctgatatgtggggttgcacagctacgggattaaatcccgcatctagtgcgggtgatccgcatgacatatggtattattacagatagtttcaattaaaacagcaaattcaattaattgaaagtgaatgggtttttattctactgtatttttggtattagtattacactgtggaccctcggggcctgatcccgggttgtactttaacgcttggactctaaatagcccagacggtggccacgaatctgttctccccacataaacatccctttcccttactgaactgaagacataactatcattgcctgtatcaattcgccatgccagttgacaagatcggagtatcgggtgactcccgtattgagtataagaccgccacactcaacggccataactactgtgagcatagcatactttggagaagtctttctccagaataaatccgaactgacgatttgcagcttaccttctcagccagcctaaatcaggggaatacgaaagcactgtttttctggtaagcggctagctcaatcataaagccacacacgttgacatatcttcatagatccatggcttccccgatctctccatcggatggcgatatcagattcccatgatcgtagacatgggtttccgggtagtagctcccgactgcctcggatatggacgaacagtgagtccttctaccctaagatgggaatgaattatcatctaacaatccaacaaggacgccccagacgaaatcgccccgtattcccacaaaagctgcgcagcagacatcaaagccctagcaacccatctaggcgaaacccaaatcatcctaggtggacatgactggcaagcaacactgggcaaactccttttcccagaaccacaaagctaatacacaaagcaggggcgcagtactcgcttaccgcgttgtcctctggtacccggagctagtaaaacatatattcacagtcagcgtgccttattcaccacccatgaccaagaatatctctatcgaatacatggtccggaacttgtcaccgcacttcgcgtaccagctacagttcaagagcgagaaagtggagaaggctattcggtctaaggctgagattcgccagtttctgattgcgctctatgggggtcgtacgcaggagggcgaggtggggttcgatgccaataacggtgttttgtttgacaaaattggccagttgaagccgtcgaggttgttgagcgaggaggtaagcgggcttagttgattttggttcggggttggggtttttatgttgactttctttctctaggagttggatttttacacggatgaatttgctcgcaatgggcttcatggaccacgtatggtctcttctgggttcgttcgtcggacgcttgctaattatctcaatagttaattattaccgcactggtgacttggactatgacgatgaacttcctattctcgagcgcggggtccaaattcctaccctgtttatccaagcgctgagagacgaggctctgccgccttatttgggtaaatctatggggcagcaggtcccacggctgaccctggagcaggttgatacttcgcactgggctctgtgggagaagcccgaggaagtcaatgagattattaggtcttggttgaatcaacaatattttgctgatggaaggtctggcaagctctgattgaaggaacgataggtatagtggcacagtgaaaaaacaggattgattgattattgtgaaaatacgtatttcatatcggaaaagtaaaaagaacatgcgcttcataacaagtcgagccagcatagatgcacaaactgggactcaccccgtaacgatcaaactatttagtactggagaaccttagtatcaattatgcagccgaccctctctaagcggtccacgtagtcctgacccagcgtagcgggagtaacaatgccaccgcgcgagacctttttgatcttctcctcctcgttaagaataaccatagcagcctcagccagcaacagtccagtaaaggggtacatggcgccgtggtaagtgatcttaccgaagacgcgctgtaccggagcactctccgcagtagcgatggcatggtactcgagaaggtcatttgtcgagtcctctctgcgcggaccactgccaggggcaaagacgaacttcttcaccagccagcgcaccggcgacagcgcaagcagcgaaagtgcaaccaggaagccgatgtgaatggcgacgccaaccagcgcgttacggaccgacaggaactgacggaagacgaattgctgcccgtacagctctggcatcaagctgctgctgcgttgcacgatggtgatgtcgcagataccggacggggaggtcgtcacggtacccaggtcgcgaattgaacgcacgccgaagatcttttccaggattgagtcgcgagggatgtttttcggtggcggggatgctgccaatgagaagggagtcattgacttggatagctcggacattgaaaagccctcgaagatggttagaatagtatttatggtgccgccgctaggaccggaggatctgttgtgaatggattagaaatgggtttctttgtggatatgaaattgcatacctcatctctttgatggtgctgtcaatctggcgggttgaagacgcgaggtcctctcggactcgcttaaccagagaccatgccaacagatcagcaggggcactctcgacaccgttacaagggatcatctgttcgcaattagcatgaatgtatcttataggaattgggtgcagaacgaacaatagcgccattagccttggcggtctcgtggtacttctcgatgatcgacttgatccagggtgtttctccagaactgtaacgatcagcaagtgtttgaatcagatatgaagcaaaactcacacatccacatagtgagttccattgacagcgcatgcctccacaactggggtcgagtacaagtggtatggacccacacagttgataaccagccgcgttttcagggctagctcgttgagctcgatagagtttagttgaacgaccaggacatctatgatgaccccagggtgagcattgagatataagagctatagaaaaatgggaccgtaaggttatgtacctgcgtccacgcggtctgggttaagacccttgagttcctgggcgatagactccagtttctctgcggatcgacctgcgatagcccatttcagatcggtaggaagatgctgcacaatgtgctctgcgcaaaatcggccagtatagccagttacgcccagcaaaaccaggtcatactgtcggttggaagtcatggtggttgagtcgatgggtttggagtttatgatgtagttgtagaacaagggaggttccggcaaatcacaagctcctcggcacgtttcaaaacgcagtgtggggcgttggaaataggagtagttggaatagtcacgaaagagttcttggggctttacatagaaatagaggcaacttatgtcacacaattgagattctaccttgaccagggaaccgcagatgtttatatttcatggcatggaagaatcacgtgatcggatagatcaattagcccgagaaaaggagaccgggggggccggtggtttcgaacggaatcaggccggattgggatggttttgatactatacaaatctattattgtacagggtcatcttgaatgatgttagagggaaagagggaaattatacatacatcagacacctgaaatagaaggcatcaagtgaaaatcaaagttttcaatatcaagtatcaaatcaaacagattcttggaaattctaccaaaatcaaccaggtcacatccaccaacatcgtcatcgcctcatctggtggaccttgtggaccgaaacacaccaagtaagcattggaaacctgaggccatcaacttgctgatgtaagcccactaactcaaaatggtcaggtgatcacaccaagccaagagccctaagcgagaatccacagcacaacccgccctcattcaaagcgtcctttttcggtctcctgttgaatacccatcttcatcctctccaccagccaagatgacgaagcgcaccaagagtatgtgcctctttctcaaattcaacacaccgcaaaacgaattgctcaatgctaactattttctacagaggtcggcatcaccggtaaatatggtaccaggtatgacatttgtctagttcgcgcccacacgactgtgatttcctcgatcgagacacacgacccttagcgaatactcctatacgacgatcaggattctaacaatatcccaacagatacggtgcctccctgcgtaagcaggtgaagaagatggaagtcacccagcacgcccgctacgtctgcacattctgcggaaagaacaccgtcaagcgcaaggctgtcggtatctgggagtgcaagggctgcgacaagacagttgccggcggtgcttacgtcgtctcgtaagtcgcccgctattgcatggagcgacactgtgatgcgacctgggcattgacctgggcttgcgcacacaatcgcgatccacaatgtaccaaaagaggaaagattgctgacagttctgttttatctagcacccccgctgccgctgccacccgctccaccatccgtcgtctgcgtgagatcgctgaggtctaaatgggaggattatgtggtttcatttctctttacggttacccaaaaatgaatgaaaaaattcgggaatacaattcttgttgcaatccgcttcggccccgagtataccgtatatcgatgtgactggttttcaaagttcgtctcggtcgctgcctacatgatagacaatccaccgcaatccagatcctccacctgattaccttcgacgttctgcgaccgcgtgagtcatatggatggactgcatatttgcggccttttgtggtttcgcgacgctggacagtcacgtagactcgacacaacatcggtggtcttggtttggaggtcacctggtcttagcgtattgtctgggtgcttggaccgactgcgctccggactatatctttcgtactttctacgtgcacctgaacatttgcaccaggtgcctagcatactccggcccacatgatatatcctactggtacgatccggtcgcatgttaacccagggctccgggcaaatcgatcttgcccgacgaccaaggtgaaaactgtccaggctgcccagtgattcaggtttcagccaaatcatgggcgcctaatgtagtcatttttaatttgtagatcgacggccaccttacactcgggactctgtgtgtattttgtgttgtacagggaccttgttggatggttgcaggatgtccatgaccagatcagatactcaagcataattagtagccataaaacaccaagtccaatagagaattcccaaaatttcaaatgtagtcatggtaataccaagatcgcagatagtccaaacccgccaatccagggcatcgtacatcattcgcctccgtcacgttcctgctttgcgttagtccggtaatccggcccaccttcaaaaggcgctccccacacctttctcgcttctacacttctcgagagtcgctcttcatggacttcgccttctctaataaatctgtttctcatgtccgatacctgtattgtttgtttaggagaccttggtgaaggagcgggtgatcctcttgagcctgtgagccttgatttgaaggatggcgacctcaatgggctcgactctcagatcgctcagctacttccctgtggtcatgtcctacataataattgcttaaaaccatgggttgaacgagcaaacagttgtccaatatgtcggcgaagtttcaatatggtggagttgagcgatagtgtcggaggtatgacgctgccccttccttgatttttgtgacttataacatggtggttacaagtactgactatattgatttgttataggaactgttacttcatcctacgctgttcaggaccgaactcaagtggccgaagttgacccttctatgattattgaatatgtggaggatgacttgatcgatttccaaccatgtacaatttgcggacaagccgataacgaggatgttctccttttgtgcgacggatgtgatgggccttctcatatatactgcttaggtttgaccgagatcccctcagggtcatggtactgccaacaatgtgaggagctacgtgctcagggacctgctcccgaggtatcagcacggccgtcgcgggcgatcgagcagcggagtcggcgaactagggcccagcagagacgactacagaatcggactcagacgaattctctacactgggcacgagtctggcaatctgtctgggatcatctgaatctcgatcttgatttccctttcgatgacgatcgatctgccgaacgcgcgctgcaacaacgtcgtcgcgaggaggccaaccagcgcgaatttcaagcctggcaacgccgctttgaagtcgctgagcgacaaggtggtggcagtcggtttcgcgatacagcatccctgttcgatcttgaccatgcccgaccatcccgacctcgggttcctcgagttccgacaccagagcccgagtcgctggaggagatgcgggcttggaacgccttcgagagggcgcgggagatcgaaaacaacccgagtgcagccaggaagcgcaaagagccaaccatgtcgccgtcccccgagcccacagaacccgagcgcaagttgaagcgtcctcgaacgaggaggccacaggagctcgcggctcgcgcacagcaaactcaaaatggggaatcatccagagctgggagctccattgtacgaccgagcagtgataattccaccgggccaagcttcctatcgtcgctattgaaggaagtcgaagacgcaccgaatcattcatatggaccttcagcttcgacatctgtcggtcctaccgaccatccatctcctggtttatcttctccctccatctctcccgcctcatctcgttactcctcccctgtcctctcggctacaccaccacctttctcgcgaagccgccccatctccccttttcaactatcatcccccgcccaaccctcatctcctcctttctcgcccgaagtgtccctatcgggtagtccgtcgtcaaatggtgccaaagaagacaaaccacaacggcaagccgatcgtcctcgctcccgcatcccccaacgagcactgtgtttcggggcatcccgctcacctgactcatctcccactcgagctggtccatccctggccctcaaagccgatatccagaaaatggtgggcactgggttaaaacctcactacaagaaaaagaccatctcgaaagagcaatatacgaacatcaaccgatctatctctcgcatgctctacgagcgggtcggggacaaggaaacgcttgagccagatgaacgcaccaacctcgaaacagaggccaaacacgaagtgcagaatacaattgacgcactggtggtgaagagcaaagagaaacagaaacagcgtatggtggcgaccgacacaaacggtgatctataatgactataccacgaactctccccggcatttaatggcgtttcttctcatctcagcgaatcatactccccggcggaacggattggaatgtataactggcgtttgatccttgccggctgtcttcttattattcttcttgtccttcttcttcttccctcccccttttgcggggcatctctgtgagaactattttttgttcgtcacctccttcgacgagagtgattatttctttttttgtggagctagtctattcgcgttctctttgccccatattttgtctaaatattatttaccttcaaccgtaggacgaggtacggccaccttaggtagcctcgccatctttggtttattgggtttttttatctcctagtcggggcttgcatgcatacttgtaaagataatctctgatgcataatttatagggacagtgacgactcctgactcaatcggggatcgatttggctgcacgtctatggataattctaaaaagtacatatagtaagtacaaaggaggttgtggtatgggagataaagctgattttgaacagtgatgccacagtctgacatacgaaatatcccagaattgaggattcgatcagaattgacagccgtcctattgaccacatcgtcctggtagtcgacgcaatttcatttcaaaaccgatagataagtatagtggcaccggtagcgaaagaggtcatagcaataaatccagacaattcttcgaatatagttggtcgttggaaagacaaactaacgagcagttgaccaaaccaaaaagtgagagtcccagccagtgctagccactgcccaaccaatgcaccaattttgggggcccatacagctctctgacaatctgttcgaccccaagatcctcaattcctgcctgctggcagaactgggtcctggacctgcggtgggaagaagacggttgggggtgcataattgggaagtttatggttgtggactgagcaggtcgaacgcaggcagctgagataaccaggtgcatgcatacgagcccactcagccactggggtactctcggttagggggagtgagttgctgtgaaatatataggaacatgtgcttccgaagagggaaggtgggtcttcacacgttgatgcctgaatagtataacgtttctgcctgcagatcatagacacttagtaactatgtagtacttggttagtattataatgtacatatatttctctacgacaatacaagaaaaaagacaaaagcagcagttagtcggttaaaaatgaaaaaaaggacaaaattcattgttaactataggaaaactgatctgcttcaccataggacttccatcctagcccagataaaaagggaccatagatcacattggacacccatccacagttctaccctctgtgttttcaccttgtcaatccatacttcctgcactttctggttcgcagtcatagagtctggggtaaatgtggagatattgccgtagtagggatagaccttgccaggaacaatgccgttgatcacgacaaagcccagctcctcgtcgataaccaggttgactcgtgcgctcgggtcattaggtctagtgttgtcccaactagttgatcaacttggctccgatcgcttatcttttctcatgggtcgtcctaggctggcgctccggcagacccagcaaaacgacagaagttctgtaagtttcctccatgtagctcaatcagaaactggcaattcttgcatggattggcaactgcattccaaaaacggccgctgagggtgtgtttataccgcggtgccctcagcgctttctttcttagagcgaggccgtgaacatttccattggtcgtattaagtccgctgtttatggtgatatgtcaatatagctcattgccgcgagaaaaataacctaccgcaagagatgaactataggatacgtttccgcgcaattgccgatggtttggtatagttcgggcctcttgctgaaggaccatccagacagtgtaatatgctcaccacccacaagccagtatctagctcgcttaacgggtaatcgccaagacccaacaaggcggtctttgtgaacgcacccaccaagcgaagcaccgagaaagaatttattcaacagacctaataataggtccaaagaagtattgttgtcagacgtctcttgtctggagttgctgggattggcgcaatctggtgatatcggggtagcgtagtctaatcgactaagagtcgaaaattctatgcctagctctcttccagagtttgtttgtctcaaggaagacagcctggtcatatgttgtcaacaaggcatgcttgagctgcatggagtcttatatgtgtcgtgcaagctggcctatatcgggttagagtcttgaaccttaggctggagaaaaattcttactgatttctcgacgaaagctccggtcatttgcctttgcgggctcccttctcagccagacagatcatgtgccaatgctcagtccttttgacctcgctcacgattttcgcgtttagatcctgccggggtaatcgaccgatgcaatcagtcccatatcgcgtaccacatccctccatacttgaactgcgccgcgtgaagctacctcatgagccccagtcaagtgctatgatcatgcaccgagtgtcgtaattggacatctatcgagtagagctcgatgaaaacttttgcacgtgttagaaagggaagttctcaatggcggcagctttgacgtcgttccttcctatcctgcagagcgccaagtgagttggtcaagggtttgcaggatttgtagggaccactgaagacccataatggggaggaaaatgatccggcaagaacggtaagaccgttttgctctcaccacctcgataggaagttcctcttattttttatgatcctccggatagctctggtcgactacccgataagcttggatgtatcatgattccagataatggtagctccggcagcctaactctgcatttagaatctgcgaaacctaaatccaactgtttcgtgttgaacacggcactcaaaacctcaccaacacattcttgggctgctcatcaacagctatcatgtgctcgaatgtcattgaggtgggctgcaaccctgaagagacagttatgatgggttgcatgttatgctccttatcgctcgggtgcttgagatggttctcgtcatacttggcaacagtcatgaagagctgatatcgatcttgggatatatgaaagcgcctatatgatgtcagtagtattcgtagttgaccaaggtggctaggggcgaagggaaccaacatattcaatcctagggatggcactgtttgccatgtgtgaggacccgtcattgattggaggaggcatttctcataggagttctgagaatgagattggatttgccattttccagagacattttccagagatggctacacaaggatggcctcgatcagggagaaagactgggtagcattccaaaggtaatggtgaagtggatggggagagagacagcggtggggggaggatctatttatatagcaatatatagcaaacaataccccgtatgtagtgccttcccgatctgactataagaatagccgtcttaccgcccccatacctgttccaggtatgggtctgtcccacataacagaagattgccacataacggaagttttgggattttaggtatcttttatatggtatacccacacaaaaggtacataaatataaaatatacataatagagattttgtcacttctatatataagatatccgagattttttttattagccaatcaattcaactataaatttattcttgattcatactcttatttctcctttaactagccaaagggttgagtacataatatggggtatatgtaccttttatatgagtggctacccgtggacgtagtaattgaccacctaataactagacagaaataggagagtgagtcgccccctctaataatatgctcctttgatttaatatctttgagctgcttaaggatcttaggatcttatgttaaggggatagggttagagtacagagtactagatgattgctttttttttttctgccggctggatctattctgccgtttctcagcgattactctttcaccgactggatttctatttttttcgacccagtagagagcgcctagtcacatgatctcctttcgaggcgttccctccgggtgcccttccggggcatcccttcccagggggaaagggttattttttatagttgcttcgcttcgctccgcaataaagtatagaggtagtgaagccctttgaagaacctatgctatgatatcattggttaaataaaagtggatatagttctcaataggtgggggaggcggggatggtgcacgtgcccttctctgcacaaagctctgacatatgtacaacgctgtgccaacagtggttacccaacttaactactacaactgaactaactacaacttgcaatttacatgattcttcggactttgccagacgactaccttgacagaagtctttttcccacgctgtctgtaatagacttgtgttgacacctgggtcatgtagcccgagttgctctctgattcttcaagctaaatactgcttgtcagtttgttgaatttggatttatgatggttatcacaagttatacatggaataaagtcatcctgaggttccaaatgcaaaatcgctaatatgatctctggccaactggacatccaaaatatcaagtcctacatcactaggctatataagcattcttgcggtgatgaatggagagacacgaaagaaaagaatcaagtgatctaaagtcttaattttaggcattgacacttgcactcttcgtcattccaattcccacagcagctgttgtccctgcgtcaacaggcagaataacaccagtcatccaccgagcatgaggtccagcaaggaatacaacagctccagcacagtcccatccatttccttcggttcccaataagcttcgtttccgacgggcctcacgcgcctcttcgctcatgcccttcccatacatcataggcgtgtacagcatctagtatcatcagcttcagttccatacaacaaacatgttaaacatactcctggacagacacaatttacacggatcccatcgagagagtgatgagccgccatagcacgggtcatgttgactacagcacccttggcagtcgggtatagcagatgaggtgtgccacccttcaacccagcaacacttcccatgttcacaatgctccctttgatctcgccatcatttcgactcatctcaggaatggcatacttgaccatttgtaccatgctggcaacattgatctccatactcttagcccactgcatcatatcaacttccaccgcagtgcccgccgcgcctccaatgccgacattgttgattaaaatatccagtcgtccaaactgttcaactgcaaagcgcaccgcttcttggcagtcttcttcggatgtgacatctccccgaatcgcaagcgctcgtccacgaccgggtttcgagttcacgatctccacggtcttgttcgcccactctaggttgaggtcgacgcagattacgtcgcagccatcgtcggcaagaaggattgaaatcgcgcgtccgtttccaattccatcacctaggcagcctgcgcctgttactatggcgactttgccaactaaagaacgcgatgggggttccgatggaatgccagactccatggttttcgatttgatttggtttcaattgagattaccagttaactataactaagtaaacagatgcggatacagtctaccttatacccttatacttgctgcgtcttttctctttcgcgatatgtctacatattccatcctcatgcggggttaccaaatgccgatatacgctgttaccggtagccgagccgaggtgatgtggggggtaaggtgatggcgctattgtctctcagtgaaatgtatgggactacatttgtacatgaattgactacccctccatgatgcccctctctgagtggctctgtcttttgacttggcggggtttactaaacccccatagatgatcagcttcttgcttatctcttatttccctcccttcttctttggatattattacctttgaccactacaagaatggccgacttcactgaatatggtaggccgagtgccgaatggatcgacctcgagccgacgctgcctaagcttcccacggacctttcggcggaacaactgaaggcattgctaaataagggccgcgagacatccgcagcccaagatatgatcaacatcggtgccgcagtccagctgcacgactacacaatcacagcccgcgacggcgcgacgctcgaagcacgcacctaccgtcccgccggcgtcccaatttccgagcgcctgcctgtttacgtccatcttcacggtggaggttttcttttcgggacactttcttctgaagatgccatttgctcgcggattgtcacctcacgtgtccagaagggtaccccagtcatggtcttgaacatcaattaccgacacactcccgaatatcaatatcccactgcttgggacgatgtcgaagacgcatttgtctggctacacgagaacattgccgagattggcgggatcggcgagcaggttgtcgtgggcggtatctcagctggtgcatggttgacggcgtcgttggcgctggctcagctgcgcggcgatgataaacgcttagcagcctgcccaaaaattgcaggtcaggtcctcatgattccttgtcttgtgcatggggaccactatgcgccgagactggagttgctcaagagtcctgatttgtcgagctatgtgcaatgtgccgaagcgcctgtcttgccggtgactcgaatgagattgttcaccgatcttcttgggattagcgaggccaaggatgctgctgcagatcgtcggatgagtcctggtaatgctaccgcggaagaggtcaaggacttgcctcctactacatttggaatcgcgggaaatgacccattgagagatgagggtctgttctacggacagcatctcgctgaaaacgggtgagtttgcgtcttgaagatttaggtgttcaaaagctaaatatttcattagtattcctaccaatgtgcatgtcttccccggcgtcccccatggatttaggaggtacaagcagctacccgatagcgagaggtgggacgaggttatgagtgacgggattgcctgggcattgacaagtcctttacctggtccatttgagatcaagtccaaataggacactaagttgaaggcggaggatgcatacatcattttgtatctgttagggatatcaacaacatagtcgtagttaccctgctagcgcagccgaatcaagtgtatgtttagcgctagacgagtatagtattaatccaaggaaatcatcagattaaataaagcagacatcaatagaagaataaaggactcgaagaataaaaccaaggcgattcaccgctcggacccacactgccgattgtccgatctggtagccgccaatgcgagtcttcctattgatttactctcctattttttattttctattcaacttcaattgtctgctcattatgcatgtctattgtgcactacatgcaatgtaattctaatccgctttcaatcccgcattgaaataaagggcgggcccctctccgacaaccatcgcttttgcgcaaagcattgcctcatttcttgtgcgcaattcggaactagagctttctgtcctaaaagctcgtatcgtgtcattctctcgtgctcaagcgttgtcccgcgaaacccgaaacccactcatcacaatgcctccttccgcctccaccaacggagcctcctccacccccgacgccctcgaatccgacctcctcgtcaagctgtccgccagctgcgcactcgaagatctgcaggaaaatctcctcggctcgctccatcgcctgggttggaccgacaaggtcaccaccctcgccacagaactcctccgcgccggccgctgtgagaccttcgacgatgtgatggcggcagtgctcgcttcagcagagggccgaacccaccccgcactaggggcccaggtcgcgaacggtgaaactacaaacggaacaaaagagaccaacggtgtcaggaaaggcaacaaagccaaaaatcactcatacgaccctctgaagtacattgaagaaatcgatatccgcattccggaaacggtggtcgacgagggtgtccgtggattgaaggatatcatacgagaagtggccgacttggagggagagagtgcgcccaacggcgacaagaaataatgacagacaccgggcgctgggaagcagcatttgaaaatgcgatcatgcatggcgggtttctttctaaggagtacagattgtttcggtctggctgcatcaaattccattggtttacatacgaagtctacgggcgctcttacatttgaatagactaccaattcacactggggttttgaatatccccctttttcaaagcactgcattttcccttgaagctttggctcttctaactatagctcttgatgacgcagtaggtactccaggccccacaaagtctactcgattgtctttaatccccgcaaatcgaatgttaccgtgaaaaagtatgatcctggcatggattatttctcatcggcttactttttcggatagccgaatcaagccctgcggttgagacgggagacgctcggcaaaggccacggattattagcccgaggctcggagagggacgtaaaattgactagtacatacttagtttttcggaaattgatatactgcagttctcattcaaatgcggcgattgctaatactcttaacaaaagttgtggtattgtcataaccaacgccgacatcagccatgcctctgctgacgagctgtggcctttagatggtgagatcataggagtaactcttttctgacccgttctattattaccactgtatggttcttgccccgccattgtcttcatcttggtcaaactgtatggatcatagaaggctaatacttgccccgtacaaggcagactggcaatacaccagcagtaaatacgggctgagagctctgatgaggacagcacctcaagaagatgttgcaatatgtcttgaacttgcaaccaatagaacaatcaacgataaacatccaccatcacttggagtataaacctacataaactggtatatccggttacaggccactcactaatagtcacgcctaaacctgttttcaaggagggcttcaaggatgttggcatatggaccataccgaggacgggtatctcaagcgcagtcggttcagctagcatcatcggagatcaaagagtgcctggttggagtaaaggacagagggagctgccaagccataatggttcgtaagtgcttggcatcattccaaggtttgatgaaggcgggggtggataacaaattcaattcgatcatcccagagatattgagtttgtagatagtatattccccaaatcaacagaaaacatattccgagtttggaaaaaggaagagatgtagttatactcttcgaggttcaaaagagtccaggcccagtcacgtggaccccgttctcatcagaccagcatcctcttcgcctaatctcgacctttgcgctaagtttgctcccagacgtcagtgaactttttgcttcggagaatagagacgtatcactcgctttaaccggtggccttactttcttccaacgcccctatcccgccgtggtcctgaaccgccaaccttccccgctttcatcttgttgattgccgcgtgtttgcactcgacggcaacacccctcctcggaaaggagttatcgagaacatatttcggccagaacaggagatacccaataaaactcctccctgtcggaagatcttgcgaatccgcccatgtttgacttgaaaccgtcaagtcttgacgtcccctcgttctgcccgcgcgtcaaaagatagagcattcggcgcattaccgccaacactcattttgtttgtctttgctggccctagtaccttggatctggcggtggcgcccgtgaacctcccatatcattcatctctactttcggtgaatattctcttgccatcgaagatctcccgtcatgtctctccatacctcctaccacgccgactccgatgcggacgatgagtacgaacgcagtgtcataacttcacctcaccttcccatcgactcggaatcttctcccacggactccgatattcattcaacagaacacaccccgaccaaatttggacatccgatcgatggtcctcgttcaccgcgaacactcatcacggaatggggagttgatgaatgcaatgaatttttaacatcacttggattgctgcagtatcacggaatatttcgaggtgagcagattccttcaagtatggttaggcagcgctatttactaaccataatctctgacgcagagaatgggattgtcggtgaagccctggttgccctgaagcatgatgagctgaaggaaatgggcatcaacagtgtaggacatcgactgacgattttgaaaagcgtgtatgaaatcaaagtcaagcaagatgttcctctcgatgcagaccattatatcccacttagtatgttcccagacgtcctgatttaaccccacttctaacccgtgcttgcagcggcggaccagagtatgaatgaaactgctacacaagaggatctcgcgcgtttaatcaaatcgatccaagttcgagacgaaaaactcatgctggttgaaacagagttgcgccggatcacagacgattaccgacgattgcgcgaagaaattctaccagtgatcaagatggtaaaagatcggtcacatccattacctccacccacttcgcatggacaatcagaaaactggcacgacagctcggccactctcacgtcaactccccaacccactatcacccaggaatcttcatcatctaaaattgcgcgggctttctccaagcgcatccatcctaacggtaattcatccaaaaacaattcgccaactcaccctccacctacgggctatgatggacgcactcatcacgacacccttaatccgtcaggcactgcctcatcccatctcacagccgggtcgcaactatcgcccggaattccttcacctacgtcgcctcaccaccaccacgctcaccctcaaaccctcaatccacgatcatacacccaaccactctccagcgcgaatcgcaacacatcctatgattatgccgaacagacgccgacaatacattctagagaccgatccactccgagtcagcttccagcatcccgcgccgagacaccatctactgcatcacgtcttgacccacgactcgacaggtctgactcacggggtggtggcggcggcggaggtggaggcggcagcgaaaacccaaatagcgtggaaatcttcaaatcatttcgggtctcttgggaagacccatgctacaaggtcctaccggctgctcttaagaaatacaacatcaactctgactggaagaactatgcgctttacattgtttatggagatcaagagcgttgtctggaattgcaggaaaagccccttctcttgttcaagcagctagaaaaggaaggacggaagcccatgttcatgttgcgaaaaatccacatggacaaccctgcaggcactccagggcctgcattagcgcctaatagcgctggcttcgatggtggccgacaaggacaaatcaatcttccaggcggtgtgctctgattcttctcaaggccaaccttcgtctgtcgatgcacgcatgtctgtggcttgagatacccggtgattttcgactgcattctttcttccgttgcatttgatttttatgccactggactatgtcgtgatgttggttttgtcggtgtttggtgggccgggcatgaatttatggatgacactggcgtttctgcttttcttgacgcttcgattccagactcgttgatgtcccatgcagcattatcagccttttctttttatttctttcaggatatccttgaccggcataggactttagtccagtgttttttttttatcatagcatattacataccgagcttgtacatgagattcccattgtttattcacatcatctagttacgggtttcaatcttatgtcagtgttttcaaatgagacagcccatatattacaaatttgtacaaagggaattactttttaagctctaaacaatccacggcagactgcatgtatgagttgttcgcaagctacggagtaggccttgtcaggcctaatgtgctttgctaacacttcaggtgcaattccccgaattcattagcccgtatctcctgtaactccatgttgccctaatcttccaaggccaagagtgctctacccatctgctgccagattattcaaaacatcttacgaatatacccaagagattgtgattataatcagcctaaagcaacattatattcaatatctatactaaatcacataaagtgagcgagaaaaaaaaggtatgtgacgtcctccccacagccagcgcccatagggcatcccgaaagataccctagcgtagctataaaagtgttgtataaagaggaacgcctttctatactctccagggccgggaacggaagaaaacccatgaaggccgaagcccaaggataagcctcagcaagccacaaagtggagccccgtgaagttgatagaaaagaaaaaagaaaaagagcaaagacgcgggcgagccggtcgtatttatgtgtctgtgtttttttttctacgctagagctgattgggcctcggttaaatggttattccggacgtatatattcataaccttggaactaagagatggttaactaacaagcagaaaagaattccctaacaaaaaaattcaaagaagaggtcgtgcccgggatcgaactgggattgctggtatcagaaaccagagtgataaccattacactacacaacctgggttgttgtgtggatctcagtgaaagacctcataagccagggggtccacttccttactgggaagtacgcaaaaatagccctaaaagattcggaacgagaattattagttctacctcaacctctgcaggtagaattgttagagctgtcttagggaactcatactcaatgggtagtctggatctcggtagctttttactattcctttttctattctcaaatcagctacatagttgcctttggagcgtctttcttgttgcggataatcttaagggcattcggcctctttaaatgtggatatgaatatgaacaaataattgcccaatagcgacgtccattgatagtatcacattaagtgatactattttactacttgcagctacacaatatttatgattacggagccattgcgattgaagttaataagtatcaatccgaattccagaatgtggacgactttcctatgcataactagggaaatacctcaaaattctttgtaatatagcttagaaaattagatcgagtagtgtgaagttgattattgtaggttctgaacataaaccttctggcaatccatgatcttcctttcgcggttcttatatagttcattccctgcaacaacatagtgagaaaatagtcgcccaactgtagatatcgtatatagaatcaactttcaaatcgagatccaacaaattcggttgtgtagtgtaatggtcatcactctggtttctgataccagcaatcccggttcgatcccgggcacgacctcttctttttgattttttttttgagaattgctgaggctattttctaatcctttaatatagttatgattagttatgtatggcctacacaacttcttaataacaaagtatctccttttctttttctttttggatttttcatagcccacttatttatatctcatcggattaatctacttgtgtggaacagttcaagctgagttttagtgatctagttcaagacaagtccaagggcaattacatcgtcttagcatcatatatacagaaacgcattagtacaaaagccacgaagaggaaaagccgtataatccagcatcagacctccttcatgccgagtattccacctgctcactctttgcatcagccatttccataacctccgcatcagaatccgcaaatgccttgtcaccgaatgcaacagcaatctcctcgagagaacagtgtgctgtctcgacatagtaaaagtgaactagaatggccgaactgagacagaatcctgcaatcactaggtagaaataaccatgaatgccggcgaaagcgtccggagagaccattccaatgatgaagttaaagacccaattgctagtcgtggccagggccatgcctttactccggccccggagtgggaagatctccgcgggcagaagccacggcatcggaccccaggtgaatccgtagaggatattgtaaagcatgacgaaggcatattggccgttcgctttgacttgaacatccacattaatttcggtgaagacgcagacaatggctagtagtacggccatgccgagacctgttttgatttttagctttcactaatccgatgctcgccttcatggcgatatatatgtgggaactgacctccaagaatgagcagaggctttcggccccatcgatcagccaaccaccaggtaacaactgttgcagcggtgtagggaagagcatttgcagcagtgtacagcagggatttgcgattatcaaagccagcggaggcgagggtgctcggaaggtagaaggagatgatgttgattccgttgatctgcgcgaacatctgcactgtgattccaacaatggttcgtttgcgataccgggtgaacatttcctataaagtgcgatccggtgttagtaatgcacgagattgacaagccacacaagtagtaaagggatcgttaccttccaaccggactttccaagattgtgctcatagataaccgcttcttgaatctcgaggaacgtcttctgaacaacctccgcctccttattaccatcagaatgtaaatctgcaattgtttgcaggctctcgtcaatgaacccattcaaagccaaccatcgaggggtctctggtaggaagaatgacatgacaaacaagacgaaagagaacacaatctggatgatgaaaggcccctgccatgagatatggtgtggcagcaagaagttaaacccaaagtccacccagcaagaaatcatatatccagcgatcaaacaactgtactctatacccaccatcaaacctcggcgatgagaaggagcaatttctgtttggatgataggcacagtcatagagaggaaacccacgcccaatccttggaccgtgcggcctccaacgaacgtggcaaaatcaggggcaaatatttgaatgaacgagctgaagaagtagatgaaagcgccgacacggacacacttctttcggccaatcatgtctccaagacgaccggctatgagtgatcctaccgccgctgctgcttgcaaacacgcaacagatatgccggtgatcgcaggatcgaccgcagtggtcgtcccatcagcacctccatagtctttgaagaagcgagttataaaaacttggttgaccagcagcccggacatgatacctatcaaatcagcagctatatcttgacaacatattcgaggacgccataccagagttataaccgaaaagggcatctcccaagcttccaaaggcacatgttgcatacaataaggatttgcctgtcaacgggtaccgggccgtgatcttcttgggtttgagtttcctctctagccagctctgctgctgctcaacttccgcggcgacagcgagggaacgctctctgagagtcgcaacaggtgccggctcggaggattttgtgatggccatgctgaagatgaatcgaccaacgaggacagcgtatcaaaaccactcgtagatttcatcaagagataagggggcaagggctttatttataccccagaccatatccgcgtggaagaggaattttctccagaatgatggggaaatggatcctggtacactaggtacactatggggtcaccatttcgccgggctaccgaagccatgtgtttttcatggccgggatgagacaatacgggaatacgcggctggctgggcatccctcgtgatcggccgtgaaaaattggccctattattgatcatttagacctagatgtagtcaaattcgagtagtctttgttcaatagtccatcatatgaccgatctcgccgtgaatctgtggggaactaaacggtttcgggactctggcggagccctcgtctcggttccggtggcgaatatcacgcggttccggggaggcttggcatatctcgaagattgtgccggcggaagacgacacggttcctgaagttgcgggattggcatcgggaagatgcgggagataatgactaggataggtgtgagagggcgagaatatatagtcaactaaggcctcaacgaatttggatgaaattgagccgtggatggccaccatttgaaccaatttatgcttcctcggtatcccgtatactagtccggctcggggcttgaacaccgatggagacctcgcctggagctgatcgactatccgccggaaaactttcaatacataggatccgttcgcacatgtaacgtagtgggtaaaatctgcagggcatccataatatttaaagcttagtagaatcccagaaagccctgctcaatcaaaccaaagaaatccgcaaaaatgaccgtcacagaagctgcccaggtagttccaacctagtcgcgacccaaacacatcggtttaatgcacctacttactcgaaaattcatctaggctaccaatgaagcctttgtactgcatcccggaggcacatttgctttcgaggaacgcagcgtacccacaatccagtcagaccgagatgtcatagtccgagtcatggcaacaggtctctgtggttcagatgtaagcgaaccggcttcgacttttccattccatttctcgatgcaacgaaactaacaagaatcctcgtcgcacaggtccactactggcaacatggccgaatcgggccatacgtcgttgaaggccccataatcctaggccacgagtcaacaggaatcgtggtagagaccggaagcggtgctcaaggcttctccgttggagatcgagtcgctctcgagcccggcatagcctgcaacacctgcaatcactgtcgcaacggccgctacaacctctgccggggaatgcgcttcgccgcgacacctccatacgacggaaccctcgctacctactaccgcgtgcctgcagaatgctgcttcaaactcccatctcacatctccatgcgcgacggcaccctgatcgagcctcttagcgtagccgtgcacagctgtcaattggcaggctttatgcaggataaatcagtggttatattcggagctggccctgtcgggttgctctgctgtgctgttgcgcgtgccttcggcgcgtcaacggttatagtcgtggacgttgtcccggctcgcctcgcttccgcgatgaaatatggcgctacgcacacataccaaatgagcatggaggcggcggacaagaatgccgcggatttgctggcaactgccggcttgcatgatggtgttgatgttgctctggatgcgactggcgctgagccttgtctgaactgtggtattattgccctcacacagggcggaacgttcgttcaagtcggcttgggaaaacccaacccatcagttccggttggtctgatctgtgacaaagagattgttttcaagggaagcttccggtacgggcctggcgactttaagttggccgttggattgctcaactcgcgccgagtcaatctggatggtctcgtcactaatgaatacgcattcggccaggctgaggacgctttcaaaaatgtcgccggtcggggtggaattaagagtgtgatctatggcccgaatgtcgaccaggaagaggcgaaagcaacggcatagtgcatgcctttgtgactgttatttttagatagaccgccgattaccctccgactccattccacgtcatatcccataaccaatacaacccaccttcaacgctatcctgagtagtgttttcaacgggttcccgagacagaccaggcatgttccaatcgtattctgctggcagctgccatacttcatgtgcctgtatgcctggctcaacaaattcgcggggttgaaggctatctccaccagtaggaattccggtggagcgatctcctggacccaaagctggaaaatatatttgttagcaagttcatcattttagctacctcggatgaatgataaagctcaccatattggacagatgttaagctattgttcaggcgatcagccctgctgaggtccggcagacgttggtctctagcaaggggattgcgagaatcccatgtcgcatctagcggcattcgaagtgtgtcttcaacagaaattaacgacggatctgccaatgtctgtaaaggctggtgacccattacttggcttgttgcggtgacgggagcaagcatggcagccgattcacgacgtaggagcatgataacaacattcttcagcacagccgtgctttgtttcgatagtgcagaccgtcttcccagcagatcttgcagacgaagaatgcgagtaatcgttcgcttcacttcctgcgcggtatcggaaagaggctccgagagagccatcacagccaaaacaatcgcggcattgaataagttgatggcaagaaatgcgcagaggtggctgtcagtggcgagctgcgctaaagccggcaattctgtcacccttgatgttcttgttgcggcattcatccatagatccggagttgtggtctggttattgggaaatccggagtcgggagataaatttgactgggccacagagggatcggtggccggatgatacatgatattatctgttctgcttccctccggtgtttgctcattcacggtgtagagatgatcaacctgccgtgctaacaaaggtcgatgcagtacaatgagaacattgtcgcaagtcagttgtagcgacagagactgcagggcgtacgccctcaagcttggtgtatcatcggggtcgaagtcacgattaaggtccagagccaaatggctcggtaggcaagatcgccatttttggaggttctcggtgacgtgcctgacaagtgcaaaatacgtgtcaccatttagctgtttggacgtcctcagagtacgtgacccgaagacggtcttgagggcaggcgacgcaatcaagtagagctggtttagctcccgctggtaggttgaatagcatatagggctggcctgaccgagggctggagaaacaaaattcgggttctcgaacacatccgctggcatatcaagattgcaatccttgtcgttgatgcccaatggccggccatatgtaattgatgcgaacctgtcccatgtgtaaatcgtccaccacactctttttctttcctcgatattctcgaaatcccctcgtagaaggccccgatgcattcctaaagactgtgccatctttatagtcgctcctaataaagaaaaggagagatttggacggccatgatagacgtgatgcgatcctaggagaatgcaggtctgggccgaggtgaccgaaggttgatccattaattccaccagatttgactcaaccaaccccaataagtccgcactcaatttcttcatgtcatcgctgttgtcggccgggtcagtgcaattcctctgagatcggtaccacgatgccattccaagcatcacggccaataacacgagaaagggtctttgagaaggatatgcagaaccatccgcgatggaatctaggctctttctgaattttggctcgtaaatggcgagagagaaccagtgtacggcatcaaaataatcttccaacagactgtacacgagctccataggaggaaacggccggctcaagatggaagatattggaatgcgttggcccgtcgccgaatttgccatagaaccaccggtgctggcctggtatccaggtatggcggatgtggtttgttcatcaatgttatggctgccaagttgacagattcttcgagcaattcctatggcggattcagcttcgccgcagttgagagacggaggcatattctcccctccagcggggaagtcagcatcatcgcccctagggtgtgcatctattaatctactttgctcggggattctttcaccgcgaccacgatcattctcatccggtgacttttcggtaagagtcaatggagatagatgagatcgatgtcgctcagttagtgggtttcttttggaacccaggcgcctgacatctgatgtaagtaaaggagagtttagaggatctcggtgtacttacttcggcagagtggccctccgtggtcgggtcgttggaagtggtcggcaatcgacgttggccctgatacacaccgagcaaggtcgaacagggtcacactagtccaggttggattcagtatacgtcctgatcaagtgggatcagggtggctctacccgagatttatggcgccgacatctttcgcaggcactccggactctggtcggcagtggcgaccggacataactgcttctatgctcgacagtgtcaacagtgaaacctccagtcatcatgaggttatactgaaggtggcatgtaggcaaaaaataagatttccaaactaaccaaatttgcgcgtgtagggtcacgcgcttgagtttatctcatccgcggatgttccacccgaggtccagggttgtgttccgttcggatataggcacaaaagtaggcaacgtaaaaagtctagatactttgttattaagaagttgtgtaggccatacataactaatcataactatattaaaggattagaaaatagcctcagcaattctcaaaaaaaaaatcaaaaagaagaggtcgtgcccgggatcgaaccgggattgctggtatcagaaaccagagtgatgaccattacactacacaacctgaattgttggaagggcagggctcaaaagcttcacaaagaaaatccttggacaaaagacaaagcttggggtttaatccaaatttagaggattccaggaagcctctaaagtattcctagccgtatatcctagataattttagggtcgggatctattgtcggtattgagggcaaatgcaaagccatttttattgaagcttcatagtgtttaataaggaatatttcctcaacaaattcggttgtgtagtgtaatggtcatcactctggtttctggtaccagcaatcccggttcgatcccgggcacgacctcttctttttgatttttttttttacatctacaaatagctgttgacgggtgagagggtgttgatacaactatgtagccctttggctggtattctctgtcatcttgtctatgatctcttaaacgccaccggtatttcccgaaagaaggtgagactgtttgagtgtgtgtttttggccagtgcaagtatggaaaaggcgtttcccgggtttcgcttacgaatgaatagaaggagatgagaaaacggaaacccatttaaggtgtaagaaacttatgtgaacttctcagattgtcactactgtgtgtttattaaatggtttttttggtatgcgtttggttctcttggatgttttcgaatatccttttggaatatataatcagccgtcaactaagtatggaattgtagaacaaacttaacaataagtttctacaattacatgtaacatacttgatggcttggtacattcatcggtctggtttcccatatataacccctctgatttccatagtaattagacgcttacatgttgaagtaatgttttaacatgtcatccacatattgtgtagaatgactggataggggatgtatgtattagatcagaatagcgtttactgggaatttgtctttccgatacacatatgagatgtcttttagtatcatcataaaataactcagtattctatctgcgcgctctatcgttaactacgaagggcatgtaagcgtcctgcgattcttacactattgccataagctccatcatgatagtgcttctcaacttcactattctaacagcccgcatctcactgcgtcaaaaacttattaggtacataacgcggcatcgaatcctcccacatgctatcagtgaggaccgttttgttcgagccatcagcatccataaccataatctggccgtaaggctggaaggtatcatcgtaagtcgcagcttcagcctggaatccccacattccagtggaccacataatgcggccatcagcagtccagacagcgtgggcatcgttagcaaacgatgtagtgagcacagtcaaatctgtcccattaggacgaataatgcacacttcataatttgagaactcgttcttcgacaggtcggtcatattgcgcgtaaacagaacccactcgccggacggcgagaagaatggcagattatcacgctctgtcgtcagagtggtggtctcgttagagtttaggtctagcaaacgcaggccgaactcaggcaggtattcgcggtacacgatcttctttccgtcgggcgagaagctggggaatcccttattggaggagttgccgaaggtgagttgctcatagctcgatccatcggacttggcccggaagatccagccgggctcatcggcgcggctttggaaccaccatcctagaccgaaggtgatccattcactatcagacgaccaggatggctggaaggacccaccttcaccgctggaaacggtggcttcgtcaagcgcgccggtttcgtaggtatcaaacgccaaggtgaatttggtgtcgcccgggggcattacggctatagaagaattgccggggctacccgtttgcttggaggtgaaggtcaattgcccatcaagagagagatcggggaagacgtccatgaagtggtaatcccactccgggtcccaggaccacagctccttttgcaatggccggatctcccagccagtcttctcgtagaccacatgtttgccgtcagcagaccaggcaggtgagcgcatacctccgagaatcttctttgcactggaagtgtagtgaataccgccgtcgtctccgcctttgagcaagtatccgatgtcagtgttcgagacatactgcgggaaaatcttgacaccggaggtattggtatgttggacaaaatcggttcctgtttcgaagtccacagaaacgatttggttggttgtggagttgacggtgaacgacgaacgcgcatcccaagttgtttgcaccgtcatctcgtagaatacaactcgcttgccatcgggggagaatctcggcgacccgtaagtgtaattcgccttgctgtacacctcgcggaagccagttcccttgggggtgatggcatagatagccagctcttgagtatgctcccagccagtgccattgtcatgaccggtccacgcggtgtttcgatcagaggaaaaaacgatccattctccatcaggcgaccaggcaggcgcaaagaatccgcttggcgactcaggcttgcccgtcacaccagtctggttggtgaggttgcgggtaacgccgatcccgaggttcttgagccaaatgttggaggtgtagacgccggccgtggaggcgtaggcagcgtacttgccattgggagatataactgccgcatcttcgaccgagggtgtggttgcgattggtgtcagaccgctgccgttcacgttgaccatatagatatcggagttgccatcgccgttacgttcagtggtgaagacgacgtgcttaccgtctggatggaaggaggcatggtattcgtagttggaggcattgcccagcaaggagcgttcatttgtgccatctgcattggcaatgtacagtttggatgaggagggattgatacggttcatcaacatgatgcctttctttcccggcacagtacgagggagcacggcatcagagcgaggcttgaggcttgcatctgctagatgcgcgtaggggcaggcggcctggcacagtgaagggcccaatagggccagaagggagaaaaagaacatgatgttctgcaccggatcgatgcttggaattccgcgagaatccagtatgttgcccagccgatcattctttatataacagccatttttgtagaatatatatagaaggccaattaaaatccaatccgggttcttcggtccgaatgtctgaattgaagatttgctgattggatatggataaactgatgacgatcgtcatgttaacggagggccacaatacggagtaactaggcaccatgtgtgtgatcgacacaaggtattgccttgaaaaagaccgagattgcaattgtttcaagaaaagcattgaagatcaacaccatgcaaggaagataagcccgagatactgatgctcggagatagccgattgagcgaatttacttagggctagacatgtaggtacgtacggagtactccgccggacattgtaaaggagctcaaacaggacgagaatgcatgagtgctgaagataagcactattattcgattgactacggagtataaattcatagagacgaatccactgaagtcgggagtcgggaccgaggcatgaagtgttttatcatgcatccttatcatcacgtgctgtcgtgtcagggacgcgttggacaactttattttcaacgatcaaagccaccagctctgacaactagatcccgatgagtttagatcgtgtcattcaggattccgacgaggacgaactctcggagggggatgacctttccacctccgccaaccccgtccacccatccgagcccgcattgcagcaggaatatcaacatgcccccgccaaaaatacgatccacaatgcagtgtatgaacatggtcctgctcctgatgaaagcataatcccggagttgagcgtcgactttgatgagttcctccaatcccaagagaagggtcagtcaatgttatcttcgtcgcagcaacggcgggaggacaaatggataccctcaactgagggtggaagtgggtcggttggtacgatgtgacagcatagtctgaagtacaaataataagaagtgatctatatactgataccgaagatgatctaggcgccatgatgacggagatcggaatcgcgcagagaagacttatggacgacgacccttcaagtgcaagcctcccttttacggccgcaccgtactcgatagaatcatttcagtccgcgccatttcctaccgtaccaggttaccacccgtatcagatatatcaaccggagaatggcagcttcacatataatccagcacccattggcgcctatgtcgatgccgcctatgtcgatgcaaatcagactttgttgcccaccagacagggtacctatgacttgaccccgcctgacaccactaatacaatggcctcgcctccgaaagtcgttccttaccacgctaccgagccttttatggaagaagagaaccctcagtcgaacccaccccagaaagcctcacaggcgaagtctcagcagactggtcccttttccccccatgacactgagcctctctcctcaattgcatcgctgaatcgcatggatgcaaatattaccactgctggaaccagtcttatttccccgcagcaatcccaatcaagcacgcatgacgagctcgctctccctgccgtcttaccaaatatgccagatgtcgggctgaccggtgtaacgaagaagcggggacgacctaagaaacaaactgggctaaataatgatgaagacgatgagctagccaactctcgagaccacgagttcaaacaccctggcgcaaatggtgcgattgacccctccgatagcgaagagaccacggaagataataccccggcctcgagtggagtctccgatgagactgacgaagaaaacttagaaacagcccctaagcctgcaaaatcaggaccaaaggagccgagaaagaagaaagctaaaaaaggcaaggcgacacctgcccctgatgccgatgacgacgtcatatgggtagacacgaagcctctcagtatggaaccttcaacaggaaatgccaccccgcaggcagaaaccccaaaggccccgagacaggatttagactccaatgttttggactcatacccccaggcaccgattcccacagcagaagagaagacacaaaacgtgcagaaagccgagaaaccagcacccaaaaaacgcggacgcaagcgaaagcagacaaccgaacaagcggaaacaccatcagagtccgcagatacacccgagccaaacaagccgccctctggagcccagactcctgcgccgaatgtgtccgtcgttgtcgataatagtcccaaacccatgccgatagctaatactgataacaacgatacatctgctactcaaagcaaggaccagaaccccagtctacttcccgatcctgaacctctccctgaaactacgattgatacccctcagcctcagactccttcgaagcgcgatacttcatctgtcaatacaccccagaacggaggaaagggcccggataagcacagtcccatctcggcgcggaatggggtgccttaccgcgtgggattgagtaagagggcgaggattgcgccgttgcttaagatggtgcggaaatagggagagtgatctgcttccttgtgatggtcatcttcaagctgtggttaggtcttggcttttttttttcattggtttggtctgttgctgctattattctgctatcattatacccctcgagagaatgttctcggcctgctttctttgttacttctttttgttttctgttggtattggtatctgcatattggtatctgcatatcttccatagttgcatgtctacatatatttcttcatttacatggaataggtgaaaggtaggataatatcctgaccaggtgtgagctgcgacgatttgtcttgagatcttctctagtctcaatatcgaaaaaattacatctatttggaggagcagagttcagcttatatgaaagcctatcattactcgagcaaaagacgaactttgtattgcaattctgatacctcttgatgattcctattccatgagctagctaaccctgccgtgtctgccgataagttcaaacgaatggtttggccacaatgaagccacagcatgtaagtataactataatctcgacaatgtaaaacccggccaaacaatcatggcaatccaatccaaagatcaaaatgattcatcacatccacatcgcaacgatcaaagcaaggaacaacgatgttgcagccgcggtgccaatggttcggaaatcagaatcagcttccgacttgtgacccttggtttggactttcgggtcccaggcatcgccattgtaaggagcctcaacggaacaatatccggcatccttttgacagccgcttccacaatgactggtggtgttgccacaagagctagtactaccacagcaaaagccataggtagatccaaggcaagtgtagttggaaccacaggacccgtcccaagagatcggcttgttgggatctgccgaagcagtattcttgggcttcttcttctgagtgggcatccggctatccttgcggtaccagagtggcctgggatcacggagacagtcgccgacggtaatggcacgatagccttgccgcttgatgcccttgagcatgtgctctgtgaggttgtggacggtctgttcatgggcgtcatgggcaatgacaagccatgatttggtgcgtgggtcgctgttcaaaagctggtgatcaaagatatccttagaccgttgaatcagatctggactgtcatttttatagtcatccgtgtcaatgtcatacaaaatgatgtggtatccaagctcgcccagctcatttccgcactctgtgtcagggctgcagctggaataaggcggccgcatgtaagtggggaaagatccgagaatgttgcgcagcgcagcttcgttcttctcaatttgctcattgcgttgcgaaggagtgatcttactgaggtcctcatgcgaccatgtatgactggcaatctggtggccactcgagtgcatgcgttcaatcaatgaagcccatggcaaggtgaggtcatcgatagagccctttccgttgttgatcccagtgatgaagaatgtcgccttcgcatcgtatttgtcaagcaaatcgagcagatcgccagtgtaacgtgtcgggccatcgtcgaaggtcaatgcaacagttccggggatagcgcatgaacgaatctcgcgagggccgtacggaacttggccgacgtgaggacgggggatttccttggttgggggtccagaaggcgatcggtgagcgtcacatttaccgtagtcaagcttgcagtctggagagcgacagtgcgccttcgacgtgccgcagaaacctatcgtagaatgacatcagtaaggtgctcaagctaacaggattttgagaacatacctgcacccgagcagcatgtaccgaccggacatttgccgatcttggggccacagcgatagtccaaattgttgggggcatcacgagtgtccaaatgagactcggtttctggttgaggttgttcaattgcaaccgtatgcacaggaccgacatgcaatttagcaaatacacacgttgccaaagtggcgacccagatgggttgaatacgcatcttgagaatggtatatagggttaatctatgttcaactgggtatgtgagatgcaatgggttgggatgatagcaacaggtgattcggagtgagaggagaagagagaagaggccagcaggatgggggaaaagcaatggagctaatttctacaagaggaaggaggacaaagaaggaaagagcgaagcttcgaggcatttttctacttaaatcacaaaacgcaggagcaagtatcgtggcaagagctcctaaccttgacaaagaggtgtagaagtagagattgacggcgcttgtattcaatatgaacgtgggtatcgtgaaatccatagccgtctggggcattggaaggttgatctgggagcccagtacattttccggatttagcaaccaaagcctagtgggtgcgatcaatatggtcatgatgtgactacatatagccaattaagatcagacgcagcacatcgggctcctgtagcagcccttagcatcatgcgtaagggtctaggcttcagtgtcggtcagacatctatcatagggcaatagttatgacaaatcaatttgcccgggtaatgttatcttctccgactgccgagaagacaaaaggaacaagggtatccaggtgtgggccaaacttcccaggtgcggtttttgcaatggcgccaattgcagcgatcaagtgccgacgctgcaccacagaaatctcggaagacaatgttttcgtcagatcggacacaaattcgttgagctggttgtcggagaagtagagcacaagcgccgagatggctgtcagggcgcgtttagtgacaacagttccagccgtgtcgttttggatgatggccatgacggatgcctggagggaagcaagctccgaatcttggagcagaggcccaaagcaggtcacgaccttgatgagcacatcgatggcatcactactgaagccccgtgatggatccttctccatcatgcctctcaccactgagctccgccgtcctgtgattgagagagtcggtccagtcaaacggggaaccaagacctccgaaactgctgtgtatgcaataatcgaattttgagatggaggctggcccgactggggacgagggagcgtatcgacgatgacgcgaagagcagtgttggggaccgatgtgtctatcgtctgggaggcagtcaaattggccaactgctcgagaagaggtgtaagggattcgagtggtaagcgaactgcgagaggaccgagactgggttcgagttagatatcagcaggatcggagggcaatagagctcgaataccatttgagggcctggttctgcacgtcgccgtgttgatcatccaaggccttgagcagacctcctgcgagttttgttgcagtaccacggtcgtgggagaggaataaagaatttgggttggtcaggattccatatagatcgttcaaggacatgtatctcaagtccgcatcggggtcatcaagcttcgctagcagggcgaaaattgtctgctgggtaacctggcggtccgccatattgacgaagctatgactgttatcggtaaatgaggttgagagaaagcctagccaaggtgacgagtgaagcagtggatagtgaaagcaccggggagagcttgcggtagcctttgatagacgccgcaacgtgggggtgtttccgcctaaggtgtcattattatggcctgaggcatgattgcaactcagtgacaacctccgaaaatgtcaactttgaacataaaatatcggttagatcttcgaatatggcccctacatagtcattttattaaggaaggtgacattgaatacttggatttctccaattatcggatctgatactcagtcgagatgcacgtgatgacgaacaccgtccaagctccaagaatggtcgttctattgataccccgtgaactataccgaggtaataaaagttgtacctgcaaggtcctctgaaagtaccagctaccgtctaaaaccaccaaaaccaacgtattcgtcaagtaccaagtacctggcccaaccatgccaattacatcacgacgcacagaccatctcggaaacaactaggatgcggtcttacgacaccgagaggtcgacttgcgaaaaccgggaagctttggtgttctagtgctgacttggcgttgtgctttgtgctctttgtgctccaatctactttgtacctaaacaatccattttcaacctatcaccctttccacgttctccatcaattctactctgtttgtacccaggttgctactacacaatggtctttgcgcgccgttcaatcttccgcgctgcgactgcagctcagtccttccgtgtcggctctgttagtcgccggtctgcccagctccttggtcgacgattcaagtatactagcaacagctatgagccagggccttcatccagtaacttgccttggtaagttatgttcttccaagaaatcttattcggtcttctaactacttctgattgtaggttggtggcctctactgctgtgactgttccaatgatctatttcctctggccttctggctcgaagggacatcacgacactcacggggacgaacataaagaggaacacacggaggatcacggcgaggtagaggaagcttccgaggaaaaacctaccgaaggatcctctgagccggcgcccaagaaggaggaaaagacggacgccgaggagaaaggcgaagagaaggcggataaaaatgaagagcccgaagaaaagaaggaagaacccaaggatgagaagagcgagtccaaggaggaagacaaggaggagaaaaagcccgaggaggagaaaaaggaggagaagcccaatgatgatgactctaagaaggaaaataaggacgaaaagaaagacgaatccaaggaggacgagcctaagcaggatgagtccgaggatgctggaaagggcgagaacaatgatggcgaggcaaagaactgaagacgccttactcccttgagcggctgtagagccaagcctgtgtatgatatttcaacatgttaatgttcgattctttgtcccatactattcgtgtacctgtacctctactatatatgagatatagataccagtcatgttagcgtgctgaagaacgatagttcattggtctattctgctagtccggtctaatcttagtagtcaatagttggccgcttatacgacctctatacttgatgatatagggttggataatcccaatatagattgtttcaagatgatatcatgaacattataattgcaattatattacgatgcctttttaatacatttagagatatctttctaggtgccttctaggataatctgtcgtaaaccagaatatgtcgtctgccgtactcttgttgctcttttgaaatgtcaataataagcgcacgtcttaaaacacaaaggaagaagaagaaatatcatcatattgatctaaaagatgaaccaaagaaaaaatagggaagcaaaccaccacgtgacacctaaagcccttccctagcagtgtttgacaatcgctcacagtatacttaggatcgtgatatcacatcttgattcttaagcttttctaaatttactagtattttgtaagttcacttagacgttacctagaagttacttagacgttacttagatgtggctaagacgttacctaggcgttacttaggcgttagccgcgctacttagaagttacttagacgttactaaggcgttactaggtaagagaaataaaagtattttgtcaaaaaatctccatgaaagacttttagttgggccgtggtagccctgagtgtaccacctagcttcaggacaccttagcaagggccgggtattcaataaaacccacggcgttcaaagaaatgcctcaatgagagtccatcgggccttcgcataacatccacccagctcaaatcctcctttccttcctcccgagtctcatcaatgagattccaaatgtcctggacggcagtccactgtgccgtgacatttggaaggtcatattgctgcaacgaacgccacaaggatgcccacaactggcagtccttgctgttgcaggctcccacaaaagcagggaaggtgacgggtggatctctgtgcatcacctcgagtgccaccagtgccttgagctcttcggcatggagcaggcacatcaagatggcatccacagggatggaagtgtcgtccacgaagatgtggttgattcgattgtggaagtaaaggcacgccgagagataccaagccacttcgaggttgttggagattatttgttgtaccttcatgccgggaccaaggaaaattgggatgttatcatcaggtcgaaaggtttgtagatgggaagtcaaacaatttatgtcttcaatgaggtgctctggtaagatatgaccgtccatgttatgttcttcgattgtttctgccaagtcttcgattttcttgatggctagctcggtaaagtgtgtgatataatttagcacaccaaatggtaagcggagtggcatagtgactacttggagtagtggtcacaggataaacaaggtggaaatgatagattgaatggtatgtcaaatgtgataggcaattggtcgtgactgtggtactcagcaaagaagggaagatgagagtcaacgaggaagggaagaatactcggagaaatcttctgatataaacacaaattgtagctactattcgtatattgacaagacgctattggcattgatgcctagacgatgcgatgtgattaacaaggcaatattaccttcgtatatgcaggcatcgaagtaggcagttgatatagtttgtagaaggtacaaaggagaataggaaagaatgagcttgttaacgacaatagtagcttattgccaatgtattttgatgcagtgaatatggaatctatatgcattatattcttcactgaagaaccagggaactggtaaatatgcagtttgtgacgagctgtctataagtgaataagtttggttatactctcgattcattgctagaaattctatcatccgaagatcttggtaagacttcgtataagatcctagtataagaccaaagcaatagcacctgaggtccgaagaagacgatataagcgagaaacgtggaagctctatctcgttggaaacaagaacccagttcagtcgtgtttctctcgcactaccttggagcttcaacatgaagttcgactccctcgaaacaccgagaaagggttgatatccgcttttcgacatcgcgctggttgtttcatcactgtgcttggtattgtctcatgccggattcatccaggccataaaggtaataatcccctctaccttggatgatgttcattactcatgatatccggcttgcgaatgttggttgtggagaaggaaaaaatcaagtctatctgatatcatatcgctgggagtattcttttcaaaaagaaaacaggaccaggcttaattgcttacaataaatatggttggttgtaagtccctttgtttcatatttgcttcataaatgacatccatggactcaaaaagtatgttaaaaaaacacaaatgatgtacatgaatgacaatagaacatcaagagacagaaaatgtagtaaaaattatttaattcatatgctcgtcaaaacaagtgccggcgcccgctcttctagagggctatctcacaggcactgccaatgtaccgggctcagacccagctccaacaaatacataacagcatatcaacatccagaggatcagctggagacacacttgatccaatgcataactataaaactgtgaaagtccccaactttgatgtcgggtaattgtttgaatgctgatcgattaaatgataatcgatcaaacttcagggaaagtgctagacttatgcctttctgctgcgagtccgaggaccacgctgttcagtgacaggctcgccgttgagcagaacctgaggagcgtggttctccttgccagtctggtctgcgccactggcaattgccttggtcgcattgacagactctagcgcttcctcttcctcttcgtcctcgctacgctcgtcttttgcgacattggtgaagatgtagtttgacaagatgcgcaggatcaggaacagccagaacaggttgacagcctgcaaactggcgagcagcgaaaaggtgatgtactgactgatccagcacttgtactgctgtgtctcccagtttagctcgaagggtccaacagtgcggaactcggtcagaacagcccagaggatcttcaggttcagcacatgacgcaggtaaatccaccatccaacgaacatggcaaagtatggcgcggtgatatacgcatccagataattgagcgtcttggaggtggccaaaaagaagtcggagatatcgtgcgtgatatacaccgccaagcccatgtacgtgaagtggaagcggtagctcagcgcaataagcgcaagcgtgataatatggtgaccaacaagctccttgaagtccttgcggggcttctccaactgcagcagcaatacaatcgcctgctgagcccaataactcgcctcgagcaggtagtacgccttgaacagaccctcgtgctcgcggtgcgggaagccctcaaacatcgccgtcgtattgaagtaccagatagtcgagcgcttcatcacgtacagaccaaacggcccgaatacaccaaagtacacggccgtatacgcttgctccatgaaccgagccgttttccccttcccacggataccacaccacaccgcaaaggggcggatcatctgctgcataataaattcgcgcgtgaacgacagcacgatcgtgtagaacgccacgaacgcaatatcctttttgcctttgccatacatgatgggtccaccgggagtcttggggggctgcgggtaggacaagaagatcgcgctgtgcatcgggttcgaggttgtggggttaagcgcgtacaacccgagcaggaacagcatcacgataagcggcaggagccatgtgtatcgcagacaggtatccgcgaagcggtggaggagggagcgactgcgacgtcgtttggtctgcgccttgctggcctgtttgtgtgcgacatcgaattgctggtgggattacgggttagtgaggggatttgggtgggcgggcaatgactttcaatacgtaccttcagaaatggcgatgatggctcgataggactcacttcgttcatcgtggacatcgctggcgcactagtgtcaccccgaatgtccacgcccaaggctgatgttcgccgggggcgaaccatggcgaataggaaactcgagcttcctacccttttggactcggagggttcgagctcacgtgctccaatggaaagaggtggatgaagggaatgagaagagagactcgagactcataaccaggacgatcgggtgaagaagattgtgaaaggtgactatccattttttttttccagggggtgaagaactccacccccgttgaccagacagcttcgcagctccgatcggaaagtcttggcatcttcatttcctttgatgcgcctttttgggatgcagcaactagcttctcggaaacccctatatacatcccgggctggtttggaattcgcctaggactgccaatcaaatggccaatacttgcgagactcccacggaacttgcgagacgaccgcggacagcgacatatcctatttgggaccccgacgtgtttacgatcccacagtcccgaatacgagcatattgaagctggataaaaatgttgggattcgttgatatatgcacggattgtggatttatgcagttgttgaattgtataacatgacatcatatcgacatgaacatgtctaacccaaaagagaagcaaaacaataatacagcggagccatctaacaacctcgtctatacacgctcaacttctatgcgtcgacaacctcagcgtgagtggcagcgcgcttgtcagcaccagccagtttttcaccaaggatctcaatatcacccgactcggcagccatagtgcgcttggtatcgtgggtagtcttccaggccggggtaccgatataagggataccgttgggatcctcaaagatctgctcgatttcctctagagtcttaccagaagtctcagggaacaagaagaagacgtgaatggtcatggcgaacaagaaaacaccgaaaatgatgtacgtctgccagcggatcgtggcaaaagcagtgggcacgaacagaccaagcgccgtgttgaacgcccagttgaacgaggtagccaaagcaacggctttaccacgcacacgtagagggtacagctctgaagggtacacccacgatacgggaccccaggtcggagcgtacgaagccacgaacaggtatgtgcaggcaattagtcccttggcaggggcgccactcagaagcattgatgcctccgccacgccgtcaataccgccggggacaatcacgccgtacttggccatgatacccgcgttggcaaacatccagatcatcatgaaaacagcgccgatcaggagagtgggacgacggccccagcggtcaacccagatcaaggcgggcatggtcatgaccacgttgatgatgtactggatggaggaagcgaggagggtggcatcacccttgtacccggccatggtgaaaacatacgtgatgtagtacatcatgacgttcataccggtcagctgggaccagatttgcgtccagattccagtcatggtgcggtggatcatcctgggctcgaacaactcgaggtagctaacgtccttgttctcgcgctcgaactcgcaaatgtcgcggatctcttgcatctcggctagaacgaaggggctgttcatgtcgcccttgccgtggaccagggtcagcaccgcctgacactcgtcccagcggtccttgcgggccaaccaacgaggggactcgggcaagaccatcattccgaagaagaggagaacagcgggaactgcctgtacaccccatgggatacggaagacggactcgctgtagttgtgggaggtggagctgttgccatgtccgatgaatgagcaaccgaaggagatactgtggaacaagagtcagctactgagtcacttttcgaatctcaaaccaggtgttaccacatactagtacatgatcaggataccccaggtgatggcccactgctgagagccgacgagacgaccacgcttggagggaggagaaagctccgagatatagacaggaacctgggcggactcaattccgacgctgagaccgttgatgactcgtccggcaatgagcatacccatgttctgggaagcgcatacgatgacggagccgataaccctaacaggatgttaaccacaacagctcaatggcaactccaccctaaccatgaccacttaccaaagaacacaaccaaccatgatagcatacttgcgaccaagacgatccgaaatgaaaccagagataagagcaccgagccaagagccaccgggcatggcagcggtaacaccaccttgagccagggtgctaagaccactacatacatcgtcgtcgttgaatggagggccccgaggcccatgattgaaataacacttataagccggcgtcccgataatggccgacatggacgagatatcgaaaccgaacagtgcaccgccaatgacggacaccgccgtgatggcgtagagattccccacgacaaacatggtgactgttagacccaagccaggggagaatgatggcaaaagaagagagaaagtacaagaaaccgaaaaaggatgaggaaaaacctccctgcttaaatagatcgcatgccggcaaaatgccctacagtaagaaatacatgactagtcaaatccacccgcatataggcattgttttcgttctgttttcttccagcatccccactccctatcccgtgtatggatcgtccacggagagggattattgtaaaacatgtgatcatctgtagataataacaataataaaaagggagagttacaacaagactatgccaagactccgcttgcaaccccagctaccaaaacgaactttaattggcggaagccggattatgcttatccacccgctccatgatgattggtggactaccccggcaaagactgggatccggggaatcgggccacgagctcacaaaattcctaagccgaagaaggccaagcgcggtaattgagaagttccccgaatccggaagccgtgttcgggcgagaaaagagtcggctgattccccttggacggcagtggcgtttctgggcagtacttaattattactagaaaataaaaataaagacactcttctggaaatgaggttctttaggaagtgtggattcattcaaaacagggtgtacgattttccgatatccccagacccaacccgcatttccctgtcaagaaacaggtcaacgcaacacgtaccaggtaattttactgtattatcttcgcaatttagccggagtgcccacatagctacgtaagaaacgaatgagaagaacatcacttcaaccggtgacgctcaccatcttaagtccggggccccgtctacggccatctttccagaatgggacagtacgcggcttctcgttaacttcagtggctgccgctcgccgaggtggagtcggcttgaactcggcctgcggtggtttttttccttttctggactgatgttggcaattgttgtgcctagttcgcccgctgcgaagtttgattgtgttcggggcttcggactacctggtattgtcacttgctattgggatggagtggaatatgaatgcccacgttgttacgtagatgatcatctagatcctcaaatccattcgtatatcttatgtgatgttccccgcgtggaaagatgcggagggctgggggaatccgaaatcctaattgcgctcaccaagactagcgtggatgatctctcatatgttctggcttttgctcttattttcaagccactgacatcaatggtgcaggccgttgcctttcttcccccttgatattgcacgggccatggtaatctagttaaagtctcatccaagaacggccatgtccaacgtacgctagatatattgactggcaccacaccttttgaacttgccagaatgacttctaccatcaggtccgcgccagagttggtgatatagcatgctacttcacctgaaatcgagtctcgttgagggtaagaacaacatcgcattggaaatacataaagataactgcttgtggtagatcatttgacaaaatacaaaaccatttctggaaagagtttccccgctctcaacacccgacaattaatatacatcactcgggacctcattatagacacgaacccgacttcgatcaacatcaccagctcctatacagaggaacacgcggctctcaacctcgttagacgttgcgatcagagagcacgctgatccactttcaccccggtagaacttcaattgttctccgggttctgaggatcatatttccaacggcggtggttctccgaaacccaccacttggccacatgggccgcctcgctgagccacttcacagcctcgggtccatgctgcttccgcacggcgtcgaccaagaacaggagttggtgatcttcctggggtttgagctcgaatgggtcggcgacgacatcggtgaatcgccacttagcttcgggcttgaggggcacgatcagacggtacggctgtgcggccgctcgcatggtgaaccacgttccaccagggttcattgtggagaaatgccattcttgcttgccattgtgctcggggatgagtgcgcgtatcatcgactggccctcgtacatcggaagtaggtctttgatgatcttattagactgcttatcaatagaggaggtttcgacgagaagatcgagaatcgtggggagaatttgggtagagaggacagcagttttgacttcgatctggggcagcttagggtgagagaagaatagcggcacgtggaaattgccgacgtgaggggaatgccaggcggtgataccgccgtcatttggaagtgataggccgctaaatcaagtcagaggctgaatggactgcgagttataggtagaacttactggtcaccagtcatcactagaagggtctcatcggcaatgccggcatcatcaagaagcttcaggatctcggcgacccactcatcctggtaggctatagtattgaggtatcggttcaacctctcattctgttcagtcgacacatcccccagcatctccttataatcaccagggatataatacggagtatgtgtattatgtgttaaatggctgagaaagaggcgggtgttgttcttcttggcatcgtcgatgacatcccggagataatttttcaatagcttatcctcatggccatgttcctcttcctctgctgtttcttctgggatatatttacgaccacctgcgtcgattgttcgctttgccatgatatccttgtaccctagagcaggatgaagcatataatgcttatcccagtcgtcagggtgtgactgcatccacatagtatgccacggccaagaagtccagtcatctgcctcgccagtggtgtttggctggtggtttatcgcatcgagtatgtgcggcaagcaaggctggtaaatatcgtgcaggtactcgaggttggcctcaacagccatgggattcactccgcacacagtgcccgtaatactctttaaagtataggtcccggaagtgtaagcgttgcttgcactgatgccaccatacggcttcggaagatcatccccatccttatggaacccggtcccaaacccggtcaagcgctcggcggtaggggtgagcttagtgagcctctcctggacgtccttggggatgccgtctgggtaagattcattgacgtgcttcatgatgtaagagtttgagcggaagggccacacatcctgtcgagtgctctctagcttaatgagaatgacatgtttaatcttcacacttccgttgtggagaagttcacgtataggctccaaaatatcgttctggaggtttggcgtgtgtagaggatccttcaacggattgtagtgttcatacacatagtcggccttgttgtgtttattgatgcggaagggagaccaatccgggaagccatctgacgaattgtatgaaggtaaccagtcaaatgtggggaaggagtccagagcagtgtggccctccagccagctgaaatcggccggtaacaaggtgacattttcataggtggcatttccattagcaggaattttaggggcgctttctggaacacttgctgggactttttctggagcctttcctgctggggtactttctggggtattttctggggcacttgtaggaggggcaattgcaggaggggcacttccattcgctggcgttggagtttcatgagcgggcgaatatctgtggctgctgaacggcgcaagagacagggagccagagagatagccgtagtccgcaccgcgtggacgaatgcaactgaggagaactaggattaagccgcacgatatgacgatcacgcgcttcagcaacgaccgcgtcggcttctgctcgggttgacgaggtgcatccaattgtgatacggagtcgctgtcgttgtgaccctcatcatagtcatcgatttcaatctgctgataggtctctggatcggacaatggctttcgtggaagacaccggcggaaagggaatagcaaaaacgaaccccaaatctccaggaaagtttcggtggcttggaagagatacggcgtagcgaagtacgcaacgatcataatcaacgtgtcgacgaagataccgacagtcaacatggacaggacagtctgggtagccgtattgggattttcctcctgggaactttccgacttcccccagtgaatctccgcacctgtatgtacatagaaggagatgttggcggaagttacggaggagatatatagactgagatgcgattagcaattgaatgttgcttacgagtcccggacgacagcttacctgaataaaagagttacaattgcagctacgttctgccaaacccgcgattcaaacgaccgggtcaggtagcacgcgaccagaatgagcaggatgtccaccaggaagaaggtggggccccacggaatgagtgatggaaccgcgagcgacgtgagatggacgcagagatggaagcattttgacaggatgagggagatgaaagtaattgagaagaaatatgtgcgagacgcgtccaggtagagctggggggatctggccactttgagggcgaagatggccgaatcctcgagttgccgacggagctgggagagatctccgggacgattccatgaagatttcatgccagcaacagcaccctctgaagggaagacaggctagaaattgaggacggatacataagccgacaaggaagagagagagacaagttaaaaaaaaactggacactgaaaatccaggggtccaaccatagggcggggcacgggttcatgcactttacggagcaacgcccgggctcttcctgacggttcttggcgcaaatgtgaccacgtgcggaattaccgggataggcaagggggagagcaaacagtgcaaatagaacaaagtcagcaaacactatcgactgcacttgtaatctcgacctcattttcaactgggaaatgtcctaggtctaattaagttacatgcaactattgttgattggtggtgaggagattacatgtcttggtcttatttcgcttagcagggtctagacagaatagatgctccgtacaatcgaacacgtatgttagttgtaggggccaaagcgaatggcacgcttactgtctctggctaattaaggggtgagaactaagacagaaaaggaaagccgaaatctgacaggcttacggtacaacatatgtgacatttctgttgtatgtcgccacttctctatggttgtaatctaggggttccttccaaagttgggatcatccggacgaaccttcgaagctctaactacatgcagttaagctgtttcaaaccaggttatgtcagtccaaatgaggcgagctgattggcaaccccctctttcagccttattgggccgatcgacattgaactatgcttggcacacatagaaccggggaatcaacaaaaaagccgattcaatatatcttccatcaagccatcttacagagatgtggatcgctcaattgttaactggatttggcggatgcttatgactacggtatttctgtggaaatatatatgtacactcatacccgcccaagattgagtgacactctatatatagttctagacatcacgatgacatcactagaataccaccagaaggaggaacagtcggtgagttgtattgcactcgttgacgtatcttagatctcttgcctatgatacactaaaccgaaggtcacagatgatggtgtactcgctggtacaatgccctaaacgagcgggtcaactccgctcagcgaaaccagggtccaggacccaaccgagattgcgctttcatgcatatatgtatctccctatagtagcgagaaagagaagtcagccgtcacattggaaggcccttttctgtctgatccagacagctagctgcacgtggtacttgctgatatgatccatatgtgatcgaccttcattatcttctttgcctgctgaaatcgtattgagcaatctccactacgatttcaggcttcctgtatttacgagttgattggcttaaatagacttgagtcattagtgaaggacgtgaaggacatgtcgatgagctcttcaggtacaggccaggtcgcttttccctactttttcggccaagttgtgatatcatgttaacaagactacctaggtaggtacatatgaatgtatgtatgcattcatctagatcatcgcaggaagagtatcgcatttgcatcatcatcagagtatcccccatcgacgttagagacatcaactgcccttcccctacctagaccataggtcccgtggctgcacagtacaaagtccgaccgcttctcttcttgaaagcgtcctttctctccacttctgaaacttaggaacattaaagttcggataccgatcgtacatctcattggggacctctgccaattgatccgcaagatcaaaagcagtctccaaccgtccattcagaagcagggtgatggtaccaatgctctcatatagtgacccataatcttcaactccgtagcccactttagttataaatgccaaccaaagtctcattgcagacaaaggccactgtggacgtgttttgtacttcagaacctcatccatctgttcatcgtcccacctggggttgccacaacgattggcctcccaatcttcataactcatgtgaccagggggaaatgatagttccgtctccgctgagtgaaagtcgaggacgagggtttcagcgatgattccacggtcatctttcctacccactggtccatatgtcaagaatcggtccaagtagcggtaaaaacagtgattgagagagaaggtagcgctttcagaacaaagcgcatctttactggtgacgatgcgtccaaagaagcgcatgtctatgtgcagcgtagagagacgggtcgtaagccgtgggactgaaatccaggttgaaaacatatacatttcatttagaaccgaaaggtcaagaatgtaggtggtttccttcattcgattgaggacctattgggtttccaccgaaacttgacgatttgtcaggagcagagagagacagttcgaggggagatccatcaaggaaggcatgattgttgatcgggcctcaagatgtttgaagaagttggcaagtactgagtttggaagctgaatgggtgctatttatgtcattatataagcctttgtctaggtaacctttgtttgccagtcgctttcaggcaacggggcactttaggaaggcacgtgggttggaggtataaaagggcctccttccccccaactcttcttcttctcttcttctctcctccacacctctctcaaccaccatctctccgtagccccatgagacagcgtcggcagagggtgccgtagcacatgctgcttcacctaccacagggaccatgacattaccatatgtatgaggtccatgtaggtctgcatnnnnnnnnnnnnnnnnnnnnnnnnnnnnnnnnnnnnnnnnnnnnnnnnnnnnnnnnnnnnnnnnnnnnnnnnnnnnnnnnnnnnnnnnnnnnnnnnnnnnnnnnnnnnnnnnnnnnnnnnnnnnnnnnnnnnnnnnnnnnnnnnnnnnnnnnnnnnnnnnnnnnnnnnnnnnnnnnnnnnnnnnnnnnnnnnnnnnnnnnnnnnnnnnnnnnnnnnnnnnnnnnnnnnnnnnnnnnnnnnnnnnnnnnnnnnnnnnnnnnnnnnnnnnnnnnnnnnnnnnntgaagtcgtggctctcattgccacttgacgagtcccacggaatacatgaggggtgtaagtctccatagccgaagacttgtaggtttgagtcatatgcctaggctagagtaacaagctgtcccttgattcgagctagaggatgacatggagaaaagcgaaagcaacatccaaaaacttgagagcatgatgtcttcccttccaatctcatggtgactgaaacttcttatttgtttatccaacaccaaacaccgtttgtacagcagagttccaaaagacaaactttatattaatattaagcacccgccaaggacgagaaatctacctaaccagctcccactcagcaacataagcccaacccataccaacacggccaaccttctcctgaaactcctgcgccgtaacaccactagcatccttccgatccccaaagctagtcaacacagccaactgcagcttctgaccaggtgcaccgagcatacgcgcactaggaacatccacataccagaactcaccaccgcccgcgggtccggagcctggtacatgcgtgaaagggagtttgtcgtcctcgcgcccgtccacgccatgaatcataagcaggaacaagcccgcatgctggatgtggctgtggcgagcgagggtccagtgcggacagagaagaccgaactggaagcgcattgcgccaggcgtgctgatggagatgtgcaggccttgtgggtggaaggtcttccggccaatggtgcgcttgtcggcgtcgctgtagacctgtagggcttggacgccatttggtcgttccgggtctgtgagaatatactcttcccaggttatatccgggcgtccgtcctcgcggaaaaactggcgtttgtttgatgggaagtgctttaggccgaactcttcgttcggcattgtgaacatcgacggttcgaatcgttgcttgtatggctgcccggcgccatctattgctcctgcaccccagcaggagtcgattagtttccatcggcctccatcgattttgacggcgttccaggcgtggttgccttcgaatggtggcaccggggcccctggagcaagtgcgttgtgtccgaagcctttgccgtgaccgccgactacgattgcctctaggccggcgtgggtggctaatgctgcaaatagtcccgcgtagccttcgcagactgccagtccagatgcgagggtactggctggcgtggaggacttcacgcaattgttaaagaaggcataggtatcgtaggcaatgttatgatgcaaccacgtaaatatcgcgcgtgccttatctgtcaaggatgggaacggcgctgtcagctcattggccagccacgtcatatcctgcgtgggaagcgatgcacgaggataccgggccgcatggttatcaggacctgagaagtcccggcataccatgcattccgtgtctgaggtgggaggtggagggcttggagacacagccgagccattcaaacgtggctttgaagccataattttggataaatccggacgagagccatgtggaatcggtggtggtgttccattgggggcagctgtgctggatttgggattaccaaacccgagctgcctaggatcctttctttgcgcaggcattggtggaggaggcaatgtcttccggataggtagattaacacttgagtcatcaccagttccatttgtgtctgtgggtaccgcggatggccgacgtgatggcagtcgaggcaccgggggttgctcatcctcataacgtggaggtgactggttaggatttggagaggaagtaggacgaggaggttgagtcggctgcgcaggctgacttggaatagagggaacgggcggtttggaccccggtagcgatattttggaggtcagtcgagcagacaggctcccaaagctcctcttactactaatcgtaggccgcggggccggttccaagctaacttgctcttttggtctgcgggcaggcaacgcaggcagctcggtctcaccccatgcgggcgccttgatgcgattgttcccagtagagttcaccgaagttgtcgatgtgcctcgccccgtagttgtagttgtagctgtcgacgttgtcgaatgtgacgcatcggaagtggctgactcaagggatggccggcgcttttggtccgttggcctacgcggtggcagcggaggacgggctggtgtagggggaggcaggcgatctgaccttcgcgtgggcaatggtgggggggcttttggctttggtttcacttgaggccggagagtttccattggaggcggtcgcaggaccggcctctgagttctgttatctgcgggttcatttccgacagatgttcgatccacgacagagccgactgcatcgtatgagggagggttgttgacggacgcgctccgttcggtcgggcggaatgatggtccaggtcctcccggtgggcgggccagttgcgactggttaagggcggcgatccgttgctggatagaattcaactgaggatcttcggccatggtgcctgagcataatgatattgaagagaaagttgagacgtccgctcgagcttaggtacctcgttcttggcttggcgggggcgaaaatagccttgtcggactctgaaacacgactgcgaattattactgacaaggatagtaggccggttatgcggcttgtcatgtcatttcgtagtcatttcaatagtcatttcataggcttcttggattgtatttttagatgtcttctttaggtatcttctcccgcttcttaagttttgggtagacggcgggaaaaggcggggaaagatttaatttgtgcagatgaacttctttgtataaccttagataatttgattcaactagagtccccgagagaaacacggcgaaagacaatacaagaaagaaaggaattaaacaacaggaggctcaactaaagaggggtcagccctggggcctacccatgggtccggatctatatttggaaattcaagttacggatctacaacatacacagtaaaaacccgatgaattataagttgcaagcagaagatgtttgaatttatttccagaatatcatgattcggagtcccaaacgccttgaaccggtgaagccctcaaaaaaaataaggaaactaggtacgtgcagatggatgaaggaagaagatgaagcaaagaaaatgacaaggagaagggtagcagttaaagaataagaagcctcgagatctccaattgacagcatgcaacccgccagaagaacccgaggccgtgatacagacataagaaaagtcacgtacatcgttggagaaaagaaagggaaattcacaaagtggtaaagccgtgggggtagagggccagcgtcgatcatcagcagcgtcacttcgtcccaatgtacatcatcgtcagggcaaacttagacattcttgtagaggagcaggggctcgccaacattctcgatctccggaatggtacactttagatcgaatgccttggctagaacgatcttgaagatctgcagtgggtcagtatgtgttctatcagacttggaataaaccgagcaacagggtgtggacggctgcaacttaccttttgcacattgatgctatggctggtgctgctaaatatcagactagccttcatagccttggcaaatcgcttggcctgcaaatatgttagtaatcgcggaaaaaaaaacgaggatcacacgtacctggatagatatctcctcctgatcctcacggggaaagttcacaaagtgatcatacttggtgcccaccaggaaggggatggctgtcttattgaagccacgtccctggcgataccactccttaatcgaattcaatgtactcttgcgagtgagatcaaacatgaaaagaattgcaacagcgtcattgcagacaagcggtagcatattaacgaactcgcgctggccaccaagatcccaaatcgagaaggtgatttcagtgtttcgaattgagattgtcttttccataaagttgacgccttcacaagtccttggttagtaaacagagctactgtagaacagaaattcaacttacctaacgtctggatgtaatcctcgtcccagctgccctcgacgtacttgaccatcaaactagtctttccgatctgcgcatcgcccaccataccaaccttaatcaccacactgttcttgttagcctgcgaggcttggcgctgaccggcgtcttggtgctgcagctgggaaacaggggcccgttctggaccactagagagtccagatcctggcctggagttgggaacaggtagagggtggtggctgagcaatggagatgagccctggcgggactgatcagtatcttgggcggcgtattcgggagcagattgatgaaagtcggtcgatcgggagtggtaatgcgccttcgaatcgctgttatagccattgttgatggccgcacggctaatggtgtggtcggaagccggctcttcggtattggccgagataggcgcaggctgttccagaggttggtctaaaggttgttcaaggggctgttcgggcgcaagctcctggccctcctgcgcctgttctgtctgatcctccggagcaatctgctcggattccgcaacgacaggaacagcgggcgcatccaccccaggagcaccaagagggtccaaattaggctccatgacgtttcaagatcggtttcggtgtagaattcagagaagcaacctgccaacaagttctgactgtcagcatatacgcgcggggtgaagaagctcaagaggggactaaccaatatcacaacgggctgaaattccagcgcaatctaacgagattgcatgtgtactgcctcaggggattgattttgagaaaattgaagaggccgagctgtgttggttctcgggggggtcagcggacaagggttgtccctgagtaaacagaccgaattgggaggggtgacggaaatgcgagtcaaagcaaacaaacgcaggaaccaggctggaaataaacgtcaaatatttgactccttcgaaactgcggggcctaggcactaaataagaacgtcaaggctctctctggtgtaccttcagctcgagggtgggcaactgggatcttacgctaggccacgataggtttagcgccgctcccacgctgttgccaaaatttacgggaaaaaaaaagttcttatcgcacatccccctcctcggtctcgacacccttataattaacactttttacgggttcaagatgtccaagagaagcgctgaagcggacgagcacactgccgccctcaaggctggcgagcggccaattgcagatgccccaatggacgaggcgggggagttcgaagacgagtacgaggatgaatttgagagtgaagatgagattctagaggccggagtggatggtcgcccagatgctgagcgcgaggaggaagagaagggtgcgcattcttcaatcctcagcctgttcaactgaactaaccttgtttaaatcttatagaagctatggatgtcgacaaggagactttcattcctgggcgaacaaaattggctcccggagagacactatcgcccgatccctccacttacgatatgctccacacactcagcacaccatggccatgcctttccttcgatattgtgcgcgattcactcggtgataaccgcaagacctaccccgctactgtctacgctgttactggtacacaagctgagggctcgaaatccaaggaaaatgaactcatggtgctcaagatgagcggactgagcaagatggagaggggaggtgaggattcagaaagcgactcggacgacgacgacatgggcgagcccattctggagagcaagtcgatcccgcttggctcaacgacgaaccgcattcgtacccaccagaccccctcccagtccggtgattactccaagcccccgcagacccttaccgcgacctggctcgagaactcgcaagtcgtcattcacgatgttaccgcccacctttctagcttcgatgttcccggcactattcttcctccttcggcatctaagcctctttccaccctgcgcatgcacaagactgaaggatatgcattggattggtctccgctccagcctcttggaaagctgttgaccggtgacaataacggattgatctatgccaccactcgcacagaaggtggcggctgggttaccgacacccggccgttcacaggccatgcttcctcaattgaggaattgcagtggtctcctaacgagcgcaacgtgtttgcatccgctagcagtgacggtagcgtaaaggtttgggatgtgcgatccaagtcgcgcaagcccgccgtggacgtccaggtctccaaaaccgacgtgaacgttatgagctggtctaaccagaccgctcaccttttggccactggagccgacgatggacagtgggcagtctgggatttgcgtcactggaagcccaatgccgcggcgccttctgcccagatcacctctacccccgttgcatcattcgacttccacaaggagccgatcaccactatcgaatggcacccctcagacgacagtgtggtggccgttggctcggcagacaacactgtcacactttgggatcttgctgtcgagctggacgacgaagaaagccgccaggccaacatggtggacattccttcgcaactgctgttcgtgcactatatggagtctgtcaaggaactccactggcaggcacagatgcccggtacgctcatggcgaccggcagcagtggattcaggtatgttatattcgttatcatgcggttgagccaagctaaccagttccttttaatagtgttttcaagacgatcagtgtctagacgaagaaaatgtatctacgctccgactaactcgggaatttcatgtgccatgtcttgctcatataccattcgaattctgtggattttttgctcctcaatatcattatgctcggagttagaccctttccttcagatggtcagggtggtgaagaaaaagtttttgtcgttatatctggcatagtaaatagacagatcgcattatcaatgaggttgatatacattctgcagggatggtacttgacagttgacagcggaatgatccaggcaactccgcctcctttgacagggcaattctgcaatgcaaagcatcagcagagcatatgcagcggaaatacccctatcactacttccacggacttatccaaagatgtgaactcgctatcctcgcctattcaaaacatcaaacatacaagacgttggcagggataacctgcacatgtgcaaagtcacaggatggaccgtgtcagatcgccaatgcgccattaattactccgtacagacagatacatatgcagcctattacatgcgacgtgacctagtacatatccgtagcctttcggcgctgacttggcctggggccgagtcgggcgcgacgaatgggccagtcggctcaatgattctcgacgtagctgaatatctttctttctttatatacggagtttatatggacataaaccgataacatttgaaatacagaatcaaaagtggtacggatcacaatacacatatgttgtagtccaaggttgcgaagctgttaggcagatcgacttggctgcgcattgtggcgatgtgggatgttttctttgttgtcaatgcgaaaagacccactcgacggtgctgtattggacgattattgtatggatattgcaatgccatggcatacataagtacatatggagcctgtggagtggattaacgctctaggtatgacatgcatgaattcgaatggagactgttgcgcgcatttgtgtcagacggatttgactgttgtgcttgtgtttctcggctcaagacatcggagtcaggtgagaagtatattatatagcgtgtatatacctacatgtagtagtctatactgtctatgtgagatacctcggttgtggtgatacctagaagcagtgcgtactgtatatgtattcagaaatgtaaatctaataatcgtatggtacctcacgctagaaaaccaatcgatctgatctaccggccaagtctgctcctatccaatctggaaaagagcattccattctctctcgtcatcgtgcctcgaataaataccgctaatgcacgcccgaatccagcccaatcacatcagatctaacttctgtcgcgtttgcgttagcagagcagaaacataagactaaaatagctccatttttgcgacatcggcttgttcgccggtcgaataatctctccgatatcactttactatttgtcaagtccagcctcttttttctcttatcggagaatcgagcggtctgttccgccggtaatttatgtacagtactgaaagaccatatgatgtcgaggtactgatgttattgccctataacataataacataatgttgcattcgatgtacatgtgtacattatagttactgggtacactccatactgaaactaaatataaacatcttcatgtttgatcttagcgctggatcaaccccaggactcgccacaaatgctcttcatttccttgatgaaaagcactgttcctgggcaggtccgaacacaaccaacgccgtaccatggcagcttctccgatccgaccttatacccacactaaaccttgatcgtccacagggactcggcccatccagtcagaccgcgagcctgagcgcctggcgaggtagctatttgcgatctgcttccgatgtagtattgctacaccgttctccgtactccgtactatccactattcggagacatagcgtcaatacggagtactccgtacggagtccaatatccaatatccaatatccaatatacaaaatgatagctaggcgtttgttatcgtcaatatacggtgtcataataatgatatctggagtaatagtccaggccgtatcagccaattgttcatcgccgggcccattgctttatccaggcacatggccgagaactgcgcagatcaatcgacaatactacgccgtaaagaattgtgtctctccatagctcgcgggagctccactagcctccatatcttctatccactccattgctatgaattgtcattgcctggattgcgattgcgtgtttcgagtaaatatgtggccagttgatcgtgtgcgacatttgacttggttctggccgggatgcattttcgccaattgccgttatttcaggccttcggtcccctcgatgtcccggcgctgatcatccgtgctgtcaccccacgtctttttgccgctcgatctggaatggcgtggttgacttggtgcctttttattatgattcatggttctggtaagtcaagatacataagaagaatacaactgtggtaggtccgataaattcaaccgagccattcgactctcgagttcggttgtctgtattaacggtttcattgtggacctaaaatgacgcatggggccgagacaagagcctcactgtgcaagagaattaaacagagtgacatacgaggcgaactcaggcacaccgtattcttctttgggctaatctgattaaatcgaggtcaatccggaaggaatctacgatatactgttaaggtgcgccaatgacgccttatcgactgagtactattcttcacagaaataaaccacccaacccgggtgcatagtcacatatccgatgagctacccggtaaggacaaaaacaaaaacaaaaggcccggctgaaagtccgatcaggggtgtcaattccgccatcccgcattgatgccagcactggccactacggcccccccatgatacgcagggatgggcggagaatttaagtgggacgttttgatagctagacattgcctgagccggtgttttatcggctgtaatttattgtctcgatgaattactgcgtaaaacacggaaaagggaagttgactgcgctgcatgttatatagtgtatattgtcagatcatctgcgaagcgcggttatgcaatgacgtttggtggaatcggcgctcgatgtatggctagcgctcatacaaggatgcccttgttcgctagtatatatgtagtgtcaagtgtagtgcctaagagtgcaggtgcagtatcatcgcatgattagggccagtggcgtctgcccctgagttactgatgagctcatgacgaagcgatggatttctcaatgaggacctgcatcagaagattggttggaactgacggatatcggcgcaaggctgtatcctggggttaaatctgtctatttaggctatatggcatttacgaacggcttcgctgcgttgcgtaaccagtatcagctgtgttcaacaccggtgaagtatgtttgggttgaggtgtacgatgctctaaatatctagaggagacatgtcttcgccagaaccaatccccttcatctacaatatagggctttcggatatactccgtggctcaatgtcggacatatcggatatattgctcacgaggtcaacacggcaattacattatacttgcatggacgcatgcaaattattggaaataggtcggatgcctttagtatgtcgatgttcttaaggggaaagccagacccttgcagcttattcaccattgggatagtccggatcaaccccgacatcaacacagcttagagacagctcactgcgtcggagctggggagggtggcttgcggcactgccatttcatttgtcaaccacccctcttgactcatctcgggtcacctgcagcctccttagactctccctagtgtgcaactagtgcattgtcaagtccgggggattctgcaaaagaggtgtccgtgcgaccaaatgcgagtctacaatgtattccagacatggcgagggttggaaaaaacagataaaggaaagttgacaaagaagcgttcaaagccgtgtctgtgtgaccgctttcctctttgtctgcatccaagtccaccttggaatgaccccaaagctgtgttagcaccgagatactggatcgtcaccataaccccagatccggcaccgatccgatggggtcggctgcacgcccaatgggctagggtgcccatgctcgcctcgttccgtgcgacccaaactcaaaacggcgtggcgtaacgtggacaacgagtccttacagcgacgggatggagattctagaaaacgctcgaggggcagattccggggaaacccaattaaaagtctgggggagccaaggacccgaaaaaaggaaagaaacaaaacgaccccatccaatgttcccttcaaattacaacccttcgccacgccagaccatgtgccatagggaaccggaggatattccttgtcggcacatccaattgcagcacagccgtgcgtgttatgtacatattccgttttatgtctgggggaattccccacacgaacccttttttttttttgacttggtctcccccacaaaaatggcgcatggatctttccgcttgtttatacccggacactccgctctcgggatggattctggaatgtttcgtttcgatgtcgaagtgagccttggaaaggagggaattggaggcgaatgggaataaaagaaaataaaagctgatagaccggtcacgagttctatactacatatagattaccattatgataaaaacgtgtatgagcttgttatgctcagtaactctcgggcccaccccgatacttccaggaggcttagaggataatattaaataattaaaacaatatccacccggggcaggaatttggttagtgcagccgcgtattctttacgatatacacacctgggcagttatcatcagttgatgcaattcagttgaaaccccaaattcccaaattcccgaatgtccgaattcctatttaattcaatcagtcaattgcattccagagcatgcaattcatgtttcatgaaacggtaaataacatcgtacgcaaataacacaatactagtcaagtctggcgttacgccgctagtcccaacacggcaagtacgtggagaccaatctcgttgataaccagagccaggaactggtggacatccggtagaacgtgcgtgtccgtaagattcagtctacgccgcattcggtatcaccctagttaatcgtgggggcatcattggcagagacgatcagcccgtgtgtcggggatccaccacctgcgctctgtatcggtaccgtctgctgactcgtccgtcactcgtctgctgtgcggttgtctgggcctgacatcgccctggttggtagttgcctcgtatgtaccctcggtgtacctttgtcctcggaccctcttatcaccggtacctccagagtacttccccccagcatttcccggttcctctctacccgccactactgccactgccaacggtgtatgtaagtaccctggcccaggtacctctcgctctgctgtagaacgactctggatactcaaccttcggaggcaatttcgaacttcccaactacttccacctctcctgccatccgtctcttttcatcatcgtcgcttccccggtgttgtcgtgggttctcattgcttatcgacaattgcctatctgcactccatcggttatctttggcttatccaactctctccaagttgcgagatcaattcgctcaatggatgcccgagtttaaaagcatatacaagtcactgctttagctccgccagtctgatgtgagtgatctgatcgaagtgcgatggctgagtatcattcatgttggtgcagtccgctgatgtcgccgattacaaacagacgtcaagcactaggctccataccatacccccccccccataccggtctcaggtcctcataccctgcaataatcgaatctcattcaacctcttctccaaacacacgccgaatccttcgatagaccgactgtaaatttgttcgccttatattggtgggtccccttcatctatctcacgacaaggttcctgatagcctcggtaccttgggtcgttgtgatagcaaccctctacgcatcatgcaagacacatgctgacttgatgtcatttggatggaacagtcgttgatgcggcacattgtacaaatttgaaagatcaaatatcgtgcccgacgcgatcttcgttccatcatacgattgacgcaacctctctttcttagcaatttcccgagtcgcaacgacttcgccacctccgagacctgtgagcaagactttggtctgtgaggagtttccaaagactagaatgctattggatgctatggtcggacaagatcaggaccataacccaaaagtggtggaccttgccagtatccacgaaattccgggaaatatgcctggtgagtttcgcaaagacaattccctcggtgcaattcttaccatatgtagctccaaaggacgcaaagaagcagaccgacctgagcggtcaaatgggtgccaatggcaacatcccgccccctaaaacagataagcctcggccccacgtctgcaccacctgcggtcgctcatttgcgcgattggagcacctcaagcgccatgagcgctcccacacaaaggagaagccattcgagtgtccggactgcgcgcggtgcttcgctcggcgcgatctgctcctgcgacaccagcagaagctacacatgaccaccacgccatcttcccgaccgagaaacggtcgccgtgagagtacgggcgccgcacccggtgctaaccgggttcgcaagaattccattgccaacagttcagcttcttcgatgcgcccgagggccaacaccatcagccacgttgagggggcggcattgggtatccccggtgccggtaatccgtcatctgcgcccacccaatcggctcacgcatatcaccccagccttagttcttcggtcggctcaagtatggactataggggattcggctctggacacacttcgatgaacggcctcgcgaagatcgaaacttccggacttcctatggacatgtccggaggacttcggactgctcccgtgtatgggagctttgacacgggtatcgatggcatgctgatgggccacggtagcaccatcaacccagcgcaattacactttgcaggatccccacaaggcttcaacgattcgccctcgtctccgttcggtcactatcacaatggacttccaaccactgcggatcccatgatggatgaagatatgcactttgactggatgaacgggtttgacacaggcatggttatgggaaatggcaacgactcagtcattgacgagtcatcgccatccgcaatgagcacgggtagccagagcggaatcagcgaggccatgttggatggtccgaatcgcattcctatctctaacggttggcacaacgcgttcactgcccaccacccggccaaccaattcgccctcgacttttccccaacgacgttgaacgatctggggttccccccggagacagtttctcccaagtctctaatggcccagaatccgttttctgagacgtacgctacccccccatctatgacctcggtcggccagcccgtcatgggaggacattctcagagtatgtttccctctatggcaaccaacggagaatctcctaatcctctcaacgttcctttcccgaatagtgccctacgaaatgaacattcaccagtctcaacggatacatttacagactccacacgacaggctctattagcgagcatgtcgacccccactggcttcaatcatcgcaagtattcccagcccgcaagtggacttctaaacagtcgcgagttgttcgcctgttcgactggcttcaacagctccagtcaactgcccagcacctcggacttacaacggtacatttcggcctacatcacctacttccacccccacatcccgtttctccatatccccacgctcaatttccaagctccccagtatacaaacaacctgcgcacgccaagcggacacctcaatctcagctcgaccggcgtcgctggaggcgggggttgcctgatcctctccatggcggctattggtgctctgtatgaatacgaatctgccgcctccaaggatctcttcgacgccgcgaaaaagatgattcagttatacctcgaagaacgacgaaaggccgacatgtctgctgctctcaatcgttcacattcctcccgcgatagctcagtacacaacaccccgctttggttggtacaagcaatgctcttgaacgttatatacggacacacctgcggcgacaagacatccgcagatattgctagcacacactgtgctgctttggtcagtcttgcacgcgcagccgaattgacacatcacctggaccccaagaacctgccgcaagatcatcttgttgctggtaaaaatggaaatgattctgctggtgactcggaaaactggatgtcttcgtcgtttagtcaaccgaaagagcgccgagattggctgaattggaagattggagaggagcggaaacgtaccctctacgctatctttgttctttccagctttctcgtctctgcctacaaccattcacctgcactcacaaattcggaaattcgccttgatcttccctgtgaagaggacctttgggcagccgaatcaccccaggcctggaagaagatgggcggccaaacaaaaacctcgtccttttctactgctttgacgtctcttctaactgccagccaacgagagcagaatcaatcggcgaacttgttccacaactctgacgatctctctaattctgaaaaccgcccgagtactttcggctgcctggtactcatctactcactacacaactatatctgggagactcgccaaaggcacatgggccgacaatggacaccgcaggagaccgatgctatgcaagcccacatcgagcccgctttacgggcatggcaagcagcatgggctagcaaccctgtccacagcctagagcgaccgaatccgttcggggctggacctttgtctgcagacagcatcccccttctagatttggcctatgttcgtctattcgtcaacctaggccgatgcaaagaggcgttctggcaacgcgattggaatggcatggcggatgagctcgcacgtggtactgagattttccagcactcagatgctgcaatgaacgacgttgtcgatccgtctctcacgggtcacattgacgtgagacgagactccatcgccgatttaggagtttcagatctagccatctccaagacaccgacacaagatgatcccatgcatgctctctccaatatatataagatgggccaacctaagcgtgaaaagcacctgcgcaaagcagcattctacgcagcagattctatatctatgtcggatcgtcttggtaacacttttgccgagttctcgtcgcgtgaactacccatccagtgcgcgttgtgtgctttcgattgtgcacaggtgctcgcggagtggatcactactgttcaagaacgggtgggcccctaccttggtatccttggccgcgacgatgtcgacttgactcaagtacctggagtcatgctattagaagacgaggactgcaagctggtggacaagatcaaggaaatcttgcggagtattgagatgaaaatgcagcgccagtaccaaactggaaattccatgtccgcgctgagtgctgtgcaacggctacctagtcttgtggaaggaggatacggatgtaaaatattgattgcgacagccagtcttttggaacgagctgctgtctggccaggttagtttcagccatctccaaacttccacaaatcaaaacgattctctaacacctacccgcagtgacgaaactgatggcccgctctctggaagcccaagccatgcgaatgaaggagcgtaccgagcactccgtgatgatgaccccttaatgaccattcccaccaccatatattgcccccatctctccaactcctatttcgcattcgcgcgcgcccgtgtatcatgaataaacaatccaaggcaacaacaccccttcttcccatcgaagcatgtgtatctgcaccaataacccgcacccgttccctccctctctctcgcaacatgcgtaccgcctttgataccctgctttgagactttgattatctgtgtcatagacaaattgcctgctcatgtcatttcatgtttctccgattgttagcgttcttgctttttgtaacccccgactgatgtccttgctgtggtgtgatgttgaattggagtgtggaaatttctggtttcctttcctcgacttactgacttcggtcgaggctgagatttcattattctttcctttgcctgtgcggtgtttgattatccagaattatacttcgtgtgaatatgatttacctttcttcaagggttgctgttagtatgtaaactgctagatcacgatctatatatgccaacttgcaattagaatggttatagctgctctgtaatttcgtcatgatcgcaactgctgaagttgggtgcctaatgtattcaaaagtggtagaatactattgggtaaaagtgacaaggggtcacgtgaatgaaaaggtatttcggacaaggatagagcaggcgataccgccatcgtccactcctgcttttggccatgagctcgtctgccaagcgccctgggcgcctcgggggcaccaagtccaagaccgggtgcgatacatgcaagtcagttgccccctagaaagtcgattagtagccgtatttgacatttgattcgcagaattcgccgcgtaaggtgtggagaggagaaaccacactgcctgagatgtactagtacaggacggcggtgtgcctatggcgggggtcatgccaggaccattatcgggcgactccagccggacatcacaccctacacaagtcagggatcgcgagagcgtcgttctttcgaattttatttccaccaagctggcccatcactttcaggagtcctggatcaggctttctggagaggatccgtcctccaaatatgccgggtagagccacttatctgggatgcgatcatctcgcttagcgcgctctacgagcgacctcccatttacgagacgtcgccgtggtcgcttataaatgatcccgccgcggtacgacatgagtaccatcacgaagcgctggtctggtactcgcgctcactggctcttctacagcaacgtattaatcagggcacggcggacctgacggtgtccttggtcagctgcattctctttattgccattgagcttttacagggaagccgcaaagctgctcagattctgtacaaacatggtgcgcagctggttttcagtgcttcgtcaacagcgacttcgactattgcaaccctcgagcctatctttcgccgtctggggacatgggtcttcctcaccaatggactacctgaagaaagctgcgatcttcatttggctgttccagacgagcaattcaaatccatcgaagaggcgaggaacgtcttgtgtagcattgtagccgaaatgaaggcccttaacattgactccaaagcttatatacaccgaacagcagatggccggctgcacgaggtatcggagttggcggccagacaacagcacctgaaaacccgactcgctcaatggtatcgcctctttacagacttgaaccctatgcttacctcgaacgtcgacggtgcaactgcgcttcttctaatgacatataagagtgtcttcatcgaagcagaagccatgctgaaccctgatcaaagtgtatatgacgcctacgaatctgaattcgcccagatcattgacctggcccccaccgcggttgcatggacacgcagctcggaagggaaacaaccaccattcatgtttgagatgggcgtgttccttccacttttcataacagggctcaaatgccccttcccacaactacgccgccaggcgttacggtacatgggggaagctcccccggcacaagggctgttcatgtgcactccggccgctcatatcgtggccattcttattgggctagaagagaaccccgacaccatgccagaaaaggtctcgcaggtatatgagctgctggccaaaccggggcatatcccaccagcccagcatcgcacatgtgattttagtgtgtcgtcagtcatggataggcatggtaggacgcggaatttgttgaattatacactttaccattttgatgatgagggaaggatacaaatcgtcgagaaaacgctgccattccctgcatgaggtcatcagctttaatattttttatgataatacgatctaatctctgagaacacttctacaaagactactagaaaagactgtcgtctaagcgcagagtatgtattcttgctctcttttagttcttagtatatctaaagtataattctttatttattcaatccgcacgacctcgtctagtagtttgttttatagaaataaagagtgcaaaatgattgcggtgagccaggcggtcaaggcctactatgggattaggggataaggtatgatgacataatatttccccacccgtgggtctcaaggttgctggggcatcaaacgcgttaagtggtttcgcgaaccataatctctgctatatctgcctggtatcaatcgcacatggccagtctatctctgtgctggaaatgaatacagcctccaagcatccacctaaaaccctcccatcgcagcgtccgacagccgcggcttctccacccaagaattaatgtccgctcagctcgaaactcaaccccaatgccctatccacggcctgtctccccggtctctctcgaaatatgcccgcactcatcctcggagatagactcagatgacctggttgcctcggatgatgagttggatgatgctgcccgagctgcaaagcgtcagcgggtcgagaagttggcggagtcttatctgcagggcaaaccgctgtttattctctcctcttcgctccgaggcccgcttgataatggatgggcgaatccatggaagaaaaacaggacacggggtactggcgcagcagtgaaagctcgccagaaaaatgttcccgagccggtggtcctggaaactgatttgcaggccccgaaataccgaaaggatctatcagttggtactcgtcgtccggatattccagcgacatcttggaactcccctaggatctctgtgcaaatcggagaccgttcgtcaccctctaaatcgccacggagacatcccaaggaacccatcccgcgctcggggcatactgcgcaaaatagagcgttgcgacggtctcccatcaaatcaaaggaaccgccgtcggcgacagtggatgaaccgtcgttaatgccgcctaggacagcggattggctgaagaaggatcggaagctcatgaacttcaccaggtttgaaccgccgagctcgccaacaatatctgttgcttctcgtcagtcggacaaagctggtcgactggcaccgcgctctgttcaagtccaggtcccacagacgccggcatctccagaaaaatgccatcctgtcaagcctgtcctagcaaagacagctcagagtgctcgtgtgaactcgaacgagcacgtatccctgcggtccattcgggccaccttgaattcacctaaggaccctactgttccttctcatttgccccgggagccgtctctccgaatcgttgattcttcctctcaactgccgaggtttgaataccggaggtggccccgtgaacgttctagtcaacagctgaagacttcccctatgcgagatgaaagcatcttgcaagaagagacttttatacaggaggacagccctctgaaagaaaaatccatagtcgatctcgaacctgccagtcctagtcccgctaaggatcaagcattggatcctgctgaacctgaacccgaacccgaacctgaacaaccacaaccacgacctagaactgaaactgaaactgaaactgaaactgaatctgaacctgaacctgagcctgaacctgagcctgaacctgaacctgaacctgaacctgaacctgaactcgaacttgaatttgaaccctcggttcctgaagaaataccagttcagaatgaggactctatcaagaaagatgcaagccataagaccttgtcgaaagaaactaggtttgcagatgaggatgatctcatagaggataatcttggggtggaggaagccgcagcagaaggtgccgccgatgcagaggctgtggcggaagatgttacaaccgagaaagatatatcgacattccaaaacacagatcactctggatcaactgaacataacacctacgatgatctcccttctgcccaacaagtgccaccccccttgggagtgtcagaccgggtaacgtcgcttcactcgacggctttggcaagagtagacccaggacaagactctccccaaagccccgatacccagctttcgaccctggctgcccttttgcatgcccagaggtcctttcaagacgacctggacagtccagaatttcacgctgagacaccggattcggaccgagcagtgcattcacccgatgcttcacttcgctcagccaatgtcactccattctaccgtctagaagagtcgattcgacgtgatctagaacggagttcaatatccaagaacaaggatgggatgcatgcaatgagcacgcaattcatgctcgatgcagctacacctttcaatttcagcactgagcaagctggtcaagatcggagcttgaaacccacgaacagaaatatgacgcaagcaatgaatacgcagttcatgctcgatgcagctacaccctacgcttttagcacagagaagagacagcgtacatcccgaccagactcaggttcacctacggcgagaggctccaagagaaaaagaacggccaatatcggaagcccttctccttctattaggagtcaatcaacatctgtcgacaacgaatatcacactgcggaatcccaatcaagcgaagatgatgaaagctcacgatcagtggccgagcagttggaccatcaattaacttatcaatcccccacagaagctgcgtccttacccctcaccttaagcgaatcggtgccaacaacaggccaggatggacaaggcgttcgccagggaatggagagcttcaacctcagtcaggcaattgcggatgctggtagttggcttcaacaaagttttgatttcatgagcagcgctcggccaagcaggagtttcaacgcgattcctacttctgacgcgcgcccttcccctttaaacatggatgtatctcaataacgagaactccttgatgctagcgactaagttcctcacttcttggtcttcccatcttcccattttcttatcttccatagcgtgttgagagcttcagcttggtagcgaagctgttctggacatgacaagatcgtatagatactgctcgaccacggagtcaaacaatctgcaccctatcaatctcctttcaaagggtttaaaagactataagacttacagactacacagcctactcaaatggaaccatacttcctttattatcaattcctcggccatttagataacggcgctatgattctcgtcattggccatgagccacttaatgtttagtcatcggcttgaaagcatcttcactttacttcataactatgtaccggataatggacttagtcatgaattccaatatcattttcggttataaatctagagcaacggagacgcaggtgtcagattccaggacactctcagagaatagactgaacactcggccaacgatactcgatataaagttcggagctctcaatattaaaacattcggctgattgattctctacactagacttactatttttcttaccgcaaacagcatctttaatgaggagagaagggcagccttagccatggaaaacggaatattattggtagttgttgaaacaaacaaggggcaatatatgattcaggataggcgaccagaatactagcgtattacttatgagattgaagagcatgctataggaatataataatctcgaaatgttttgggaaggacttttgtctgaaatctgttagctaggaaatggataagaatcgaacgcagccagttatctcagtcctaagctgcccttaaggactaactcagactatttattctgctgagcgaagaataagtttcgaaaccgttagtattctaagtttgtctctacctaactattccgttcgaataaaacctaatgtaacattattatatagattcttccgatgccgcagaggacaatgacagcttgctataataggaagctatcccaaagccaggcatagaaacgtacgcctttcagcatgggaaaatccaagaataaacagcgattacatgctatagcctgaggcagttggcagtttcgaagtccggtactattaaatgcttccgaaataaagatagttggcaataccgagggaacatttcaagccactacttattaggacatgtcttatgtatgcttgatacttggactctgagttcgcgacaagtcccaaaggcccaaatgaaagatgcaaatgggctccattcttatataaagggcgtagttcccaagagactacgcaggggtcctttggctgactggatttaagtaacatgaccttctttgagatctgagagggaacagacccgtgcttgaacccccccagtttgatgtcacctactaaaattcacttctacttacatatgtttaacagatacgtccagataaacgaataacaagctgaagatgaagcagattgttactcactctagatcaaagtcaggatgtttgagaatttttcagtgttattgggcactctgtcgctcatcacttcttactctgttcttaaccgtttgttctttgccgtttgctgttcacaaattgttgctgactatttgtactcgacaaacaatttcactgatcattgggacatacaatagagcaaccaaaccctcaataagatctcagacgtgaaccctgcgagtcagttctagcttagtaggctatttagtataagtagtattaagatacagtgaccataaagtagccatagtatccttaccgatatttattaactagtatagaataagatgataaattaggggacaaccgttatcaaatttagaataataaaaacgttcaaccaagcaacctttggcctaataggccgaacaaacagggccctatggttcatatggggtaataggaagcgtgcatgtacagccaaggtcgcggttgaaacggttacagttgttaaggagcgctgttctactgttagtaaaagttcggagatctaccatgacgacctcgggagttagagatctcttttataacctagacattataagtaggtaagtataattaaaccgtttgcatgcagaatatgaggacctgtgaaatcgacgccgaaaatatcagcttttgacgccagagcggctatagtgcaatgcacattaatatacacctatagattttgaatcatgcaagtacttatagaaaggggtgctcgttgacttaccagcctgcatttgatttttgctcaacatgaaattagttgaggcagagtggttccagcatgcctcatttgggcagacatcctcaccaatgtttctcaacacttgtcatggacagacacggctgagctggtgcaaaacgatgcatgtgagcaaccagacaaaccgaggagtctacaaataccgcccgtaagatcttcgtgccactggatctctacattttctatcagcaaatccattggaatgaaacaagaaatgatcctgccttgaaagagcgtctccttctcaagattgtatcacgcatgcgttcgatcgtattacaatctctcttacaccaatttagatatgcaggtcaaaattccaaaacaaaagacgtttgctggctcatacggtcattggacggcttaaatacagtgctcagtggcgcccttgatcacggcgaacaccccgaaggatatcgcaatcccggaaatcaatatcacgttcggataccgatccccatttgagcttcctggtccaaggcctaaccaaaccagacttcccacacggggcgagtaggcctagggcgcagcctccgtagccaatattggtggattgctcccttcattgcggtattgtcctggtctcgactactgcgccatgtgtcttggacttccgaggcgctgtaccttgcccttcatgtatcttccaatttcccggatcgtcactgtaaatacctcttttcccacccccatcaacctaaaaacgtcctcaacagatgtgccctctgcaccctactctgacaagttcaacatcttgagagacaaatcccacaacttcttctcgccctccggatcgaaggcgtgtggtgcaacaccgaccgccagtgtaccaccctcggggaccgggccagcttcctggcaatcctccagatagacaccacccttgccttcccattccttaccaagtgcagccgttatggttgtggcagcgccctgagccgagctcttggcatacttttgcgcaaactcacttgaaccccactccttcaacgtttccgggtcgacgtggcgctgtaggcttgtggcaataccaccaggcatcaacgagaggccgtgcagaccctttgacccgtatcggtgctcgatctcgttcgtcatccaaatacaagctgtcttggcattgccatatgccttccacggctcgtactcaccctcaaggttaatgttgtcgagcacaacagagctcatgtgatggccggcggaagagacgttgacgacgcgggattggaactcaggtgtggaactggacaagagcgtctgctcgagtagcttgtagagaaggaagtggccgagatagttgattgcaagctgcgactcgaagccgtccactgtcttcgcctctgggcatgccatgatccccgcattgttgaccaagacattgagctgggttgacttggacagaaaggtcttggccgcggtgcggacgctttccattgagccaacgtctagctcaagcagctccacacgaccgggttcaagtatctctgccagagcttgctttcccttctccaaatcccgaacgccaagatacactttaccaccagttgcggcgagcgcacgaccagtttcaatgccaattcctccagaggacccggtgagaagaaagacctgtttatggtcaattccagttctggtcttcagcagcagcaatgcccaccttgtccttcatgttatcgatccggtcgttgtccttgagaatgtcaagagctgtaggtcgagcgtctccaggcccattctgctccaagaaggcctgagtgtacttgccatgcttgccaatgtgattactaatgagcggattggccatgatggtgattgtgatgatggaggatagctggtagattgagtttgcaagtggatgctggggagaaggtgtatgtctggtggggctttatatagggtgcgggggagagcgtggtgatggggtgacttgcactggcacgacttggaacatgggtccagagctgaaagactgttcgaacctcggactttatttcggattttgcttaagaccgtttatcgggcgaggatattcagacagatccacattcagtactatacccgtccaattaagattaactccatcagccacgatattgggcttaaatccaccatatgaccacatcatcgttatttaacaaagaagaagggagctgaaaatgtggtttcgtcttttttccggaataggatagcagccgaaacgaatcgccaaaaagaccatcgggataagcccgagtcgggcaagcggggagacaggaacaaagaaacccctgttggtcgggctgccttgatggctccctaaagaggggcctgaaccctggcccccatacgtcttcggaccctaccaggttacctaccatgagaatgcatgcctggatgattcaagttagaaggcacttgaagcgcctcaataagtacgatgacatatgccttgataatcaaagtacccggattctgctggcgtttgcaaggccaaaaatgaatcttttactccatatacaccatataaatgcggactggcaaaccggtaaataatctggagatacctacatctgtatttagtccataagtttcattttttggacttgcaaccaccggaataatggagatacctgatttgtatggtgtccaaaagcttcatctaggcaggttgatgtattgacaattcaccgtacactgtattagggcggtatagaaagcagtactaattcaggtatcaaggcatcaggattcccctaaaaagggggtttgagggtcgcacaatgcatcttgcttaagcttaatctgtgtaacgcgcttcatgcttatatctattcttgctgaatctatacatttagttgtagcgacgcgtggtcttgctccactgctcattgccgctcatctggtactctaggcccttcatatacgccttggcagcttcagagcagccgtctggggatgcgatcttctctgccacgatctcgtcatgcacagtctcccactcccgagtcatagaccaaagcacgcgtttcgttgcgggtataccaagcttggactcctccgccagaaccttcacagctgaacaaaggaaggctccctccttgtgtccagtccgagacgcttcctcttccttgtcataactgtatatgtcattgactacagaaagctgcttggcacagttggcttcaagggctttcatatcctgaagctcatctgcactgagtctaagtcccatcgagaatctcattagagccgaaagcaacctggccgaacagtcagtatcacgagctcgaatcctgggcgagaacacatacgccttgcctacatccttctcacggtactcgagataatgccccaattcatggatgctcaaacgcgctcgatctgtctgcgcgcgcatgaacacgaaagtcggctcaagaacttcgttggccagctccgcatcatgggcgcgcatgctttcccagaggtcatagagaatgaactcttctggcttggttcggtccgggagcacgtctccacgcgatatcgggatcaatctgttgttgtaggcttctccatccgcgaaagacatatgctcaagaacatctaccctcgtcagtgaaggctacattaggccatgtcctttcgcactcaccatcgataaggaagagaacggtcagcagtcggcaggcaaagtggatgcgatcgtccagtgcaagagggaagtaaagacaagtaacctctgagaacttggcatccaagaaggtgcgaacagccttgaagctgggaaatttccagttctccaggaagtatccatcgacttcgtcctgtacctccttcactcgtggatggcaaaggtacgaccactgagtaggaggcggagtgatcgtcgtgtcatttctgggcctgattgtctctttgaccagagggctattgatagggttttcaaggtgcacgaacggttgggccagggaagaaatggtttctgttgaggtagccatgtcgacgctcaccgggtttgaagggttatactcgtggataacagctttcagtaagtgcgaggaagcatatcgtcgaaaaaataccagacttcggaaactcgtccagtcttatcaggagctcgaattgatcgtgtacgtaggactccgacgacctggatgaaactaattcgaactgtcacatctggtgttctttccgagttcgcgcccggtcaataaccagctgtttcgatgtgtcgggccgagtaccgtatgcatttgcggatttaattgggaaatttcctaaatcggcaaattcaggtagagcgccctcacaggaatagtgtactggacatgtcggccctattaggacatgccggctgggcttcgtagatttgcaccaaccccggcctgagtgagatgagtcagatacactactactaagcggaagcgaccatcagcaacctctacaaacgcagctattcagcttgccccttttggtgatgagataatacagaagctagaaacccctactgccatcaatgagtacaatcactatatcggtaaggtagactggtataaaccaccagagaattcaattctataagcaaaaaggcttgcgtatggtcctaatataagagacaggaatgtagcagcgtggctctatatgtgaaagggcaatgtcggcatgaattccatagaaaatagccacttcgaattaggtttaattgattaaactgcttcgtattactggatcattaccgcaattagcaaaataggacgccttactatgtatgcgctagtaaaagttgtgctgacggacaagggcatactcgggagtgactcggtagatacataaagatcctggccctgcagctgcatagtacctttctgcttaatattgttggctccaattttgatttcagtatctttctaaacaatcatcatgctttctcttaaagcttttttggccctttctctgtctattcatcttagccagggtcttgtggctagcgtctcgcaccgtcgcgctaatgcatgcactgagctctcacgaagctaccctgacagtaccattcaccctggatcttcagtctttgccgaagatgtaattggtaatgatcttctctctatgcatgtcaagccccccacgcggaaaggaggctaacacttgatggtgtagagccctggtctcagacttgtcaaactacgcccacgtgtgtttttgccccagcttcggccgaggaagtagccggtggcttggctatccttcgtaaagccgaccagacctttgctgttcgcacccaagggcatatgcccattcctggcgctgccgacatcagcaatggcgtgctcatggttaccactagcctgaatagcgtacagtacgcagacgactctaaatctgttgtccagattggcgcaggaaaccgttggctggacgtttacaaagtgcttgccaaagacaaccttgccgttgtcggtggacgctttggacaggtcggagtgtctggccttctgcttggtggaggtatctcttatttcaacagcggtatgttaacgaccggtcacttccatgaaaaattgaactaattgagcaagaccacggttggggagcgaacagtgtcgtcaattacgaagttgtgctcgccaacggtactgtatgcgcggcaaatgcgcaacagaactccgacttgtactgggccttaaagggcggttctttcaactttggtattgtcacacgtttcgatttggcaaccttttcggttccatacatgtgggggggtagcgctttctacgacgcctcggctttggatcccttggtcaacgcatacgcaagctacgctgtcgcatccggtggttccagcgatcctgcagctcattctgatccctcgatcctgtacaacgtgactactggcgaggtatcgggctatggtatctatatgcacagaggtgacgacccggcacctgctgctctcaagaacttcaccgatataccttctacattccaggacttccgtgttggaaagacaattctgggcctggagaacgacacgactcctgtgaactttggagtaggaaatcggagacagcttttttcgtccactgctttggcttccagcgctgaggcagtgtacttggtcaaccagactttcttcgacgtgattgcagcaaacccacagatcaagaccacgacggatctcagcgtcaccaatacctatcagcttttcacccctggtatgatcagagccgcaaaagcctcgggtggagatccgatagggctctacgacccactcggcaacggggttctgggtaagcatcttgcgactgtgtctaaaattacccagttcatgaactaacttcttcactagctgttctgtacggcggtaactgggccgatgccaaggatgatgagataatctacaagttcttccaagacatgatcgatgagctcgacaacagggcgaagaagttgggcctttactatgattttgtttacttgaacgacgcagcacccactcagaccaaggacatcttccagaagttctcgaacggaacagctttgccgaaactgcgggagatcgctgagagctatgatccagaccaggtcttccaaactttgactcctggcggcttcaagctcatcaacagcccagcatgaaagcttcgggatgggctctccatggcttcctctaccgccaaagtctcgtcgaggtatatgtttatcgtaggatgtggttactttttcatgtttgtataatgctatagagaagacatatacttggctcacagccgccccttaagcctgtttctccacatacttccccctcctatatctagagtgattcgggaacactaggtgtctgtactatcctaaggcgggtgatatttttattcatttagtgaggtatgtatacgagcactcggcaagatttccaaagaaatatgataaggaggggctaggcaagtggcaagctctttgctacctacttagctgccttacttgaatggataacttgtataaagctgcttgttcaaatacttggagaggtacttggatacatagttggctaggtactcggatggatacatgggtaggtataaggctcacatatctatgcggcaagcatttgtgactgtacttgattgcgggcgagccccgactcacggacctcgacttctacctgaagtctgctgtagcttgctgctttttggtcaagtcagtgttccgccagccaaaccagaccggccgcagatcagccaacttttcctccaattcagtgtagtgttctcccaacgtcaaaattgtgcgcccgttccacttgctttccagatctagcacattctctttgccgtaagtctcaaccatccgtggctgacgggccacggcagaataaaccactgccagacccaccatgtgagcagaactgacgggcagtccggctgccatgagcggcccggcaatatccatggggagtagcttcgtgatggttgccgctggcgcaactgcattgattgagatatcgaaacgggggagcgtcgaacgcaaagaacgaacgagaccgaccagacccgacttgatagcactatacaccggcaagttctgttcaggcgcgtatccagtcgcactagcagtgatcacaacggagccacccttcccttgttttcgcatgtagctgaccgccagtttggtaaacatgacggtacctttgaaattgacgtctaccaccgcgaatccaggctccttgagttcgccctgctcgtcaaaagtatcctcgaagtatggctgttcttcggagacgccagcgttggccacggcaatgtcgacatggcctgcttgggcaaaagcagctttgagttcagcccaagatgtgatgtcggccttgatgaaagtcgaattttcaggcgcttcgccactgtcgggagggttgcggtcaaacaggaagattttggctccggctcttgcaaagatatttgcagcggcaagcccaataccggaggctccgccgctaatgacgaccactttgccgtcgagccgcgggatgtcttcttctttgatgttgagagatgtcatagtagctcttgggggttgaactgagacgtggtggcaccttaatgtatccaagtggagcagtaaaggtatagatgctggctgccatcggggaatcatggcgttgttccttgactttcatgagttctgtgatggattcgcccaactcgaaatatgcccagataggcaaaaagccggaacaacaagaacctactaaaacgggatagctagcaatcaagtcatttcggtgtgcctcccgttgccggtttaagagacaatccgagcagttgcatgctttgtgaattgtgatgcaaggggatgtcgaagtccggcttcatttcccagtgtgaagagattagaaaaatcacaattttatttccaacgcctttttgtgaaagattcaaattccgttattacatgctgtttagtgtattactctatagtatattattcaacagtttgctgggtgttggatcagggttacggcctataaataatcatcaaattatcaaatcgtgaatatccatgattcaaatggattcttttgatatttttttggtgacactgaggtgctttagaaattctcctagtagatatcctcacaggtgccctgcaaagtcatccgcgtctcttctgcaaactcaaatccctttcaggccttgagacgtctttttaagagcactcgcacacttggatcgggatggtagcctcctggtgtccacaggctgtcaggtcgccctatatctcctttaaacttgaagtcaaagttgtcgatcaaatgtacaagtatcatcttaatctcattcgcggcgaaaaaacgacctgggcacgcatgcacaccatagccaaagtccaagttattcgtcccagtcgccgtaaactggtatttggactcgttacctggaaggtccctaagcttctggaatctgaagccgtcgaactggcttggattttcccataagtcctcatcgttcgaaacttggtgcaaagggaaagctatgtgcattcccggctgcagcacagttccatcatgaagagtgataggttgaacgattttacgccgcatgttcagcagagatatcggactaaggcggtgggactctttgagaaacgagtccaacttgcgcagctttggcatggacgacttattgaggtatggcaatggctcggtcgctctcaggtcctgaagctcgtcacgaagaggctgtaggtactcgggtctggcagccaagtcgaaaattgcgttcgtcactgtcatcgaagtcgtgtgaatggctgccatacttgtcgctagctgcatctgtgcctggatgttgaggctatctcgttccttctggttactgttcttgatgttccatgcacacatattgtgaggcccggttcccatttcaagctgctgtttggtgccagcgatgatgggcgccatcaagcgtctcatggtagccagtgatttgtgcactgctcgaactttggtgttgagataccgtgaggtccaacgaagtagccgcgggtatgcccggatttcaggtacagcgaagaaaacattgagtgtgaactcgatgatgcaatctaggtattcctggttacggctcattggaaggcccacaaaaatccggccagacactaatgcgacgatgcgaacaagcttactttggatgtcaatttcggtccagtctgtgaaaagaagattagtgaatgatgtttcaaggtccagtcaccccgagtcttaccgtcgcaaggtgggatcaattcttggaaggagtacacaacttcttcatgtatatcgcccatcaggtgacctgcaaagctttagccacatcaaagacgctgcagtgtaggttagcttaccgagagtctttgtgagctcgttcttgacactgttcaccacagtcgagatccttccgcccacagacgttgtcgtgaaaaggctgtgttcggacaggaaccgctgcaccattatcagttaccgcactgctcaaccgcgcttgcagacatacctcatcaatctcgtcatctagattgagcatattgtcgggtagagcctttagttcttccatgaacttagtcggcaagatgacggtctcgccatgggcctccttcaaggtgaagtatttacccttgtactgtggagagtgtcaatacagctctcgcgacatggtaggttctcactcacattctgaaatccttccctaattgtcttatccaatgctatgagatcgattggtccggtctcgtcgtaaagctgtggagcggggaattttggcggttgtcgaggtgcaaccagggcatatgcgcaagcgcaggcgaacaaggcgattgctgttccgagcgcatggtattggtagctaagtgtaagtacccgagaaaggtgatccagcatatcgacgttgttctcgagatcgcggattggtcgtcgaacgaggtgtttatcaacatgagtgtgagaatcgagagcagaagaggagaagatcacggccatagacgcacaggaggctcatgaatctactgcaagaaaggctcctagcgtcggagcggaagcatgatgggaaatggacgcgccggttttgttacaaatgcctataaaagatatgggccgagttagtcttcggaattaaccatatacagtgctgctcccgaagatacgagttcacgggcttcataccccgagaggtgcgcatccgtgggcaagtggtttgataaatactcttcaggtgcagtgggatacaaaaattcaaagtcccacgtcacttttcgccaaggtattgttgttctcgctacttgaaggaataaacaaaggctcaaattgaagttatttctagtattttgtataccagcctttcgtttcaattactgtttctactcaatttcccaccatcatagctaatctatagaagtttcccatattaatagcatgctatgcttcttgcgcacctttgattaatcattctaaaaccctttcatattaaattcgatgatggtcgccgggggataactgctgtcgcactactattatgaaaaaaccccccaaaaatatgtatgtaaaagatagacctgtatttgaaagcagcaagaacaacattaccgaattagatctacttcccttgccaaaaagtgacataggactcagactttttgcaccccagtctgggtacttgggaaggtacttgagaagttgattgggtgggtacgatcggaggtatttcaataagctcgtgagagaaagtactatcttttatctgcgatatctagccagtcttgacgtctgtccgcttcttcagcgccagcttgacgtacttgagcggagccaacgtgactgtacccgctgccagatgatcaatctcctgcttcactactttcgcgtccatgccttcgccgagcacaatgcggtacttccccaagactgtcgcaagaacactgatgtactcggactgtgtgaatttccttccgaggcaagcgcgagcgccgccagaaaaggtcatcaacgttcccctgacctgtctcgacttgtcctgtgcgacgaccttcttgttagggcgcgaatttggagtgacccctatggtacccatccatctatcaggcttgagagcccagggatcgggccagtacctttcgtggtagtgaacagcgttgacattgaggtacacgcggcactcagccggcaggacatgctgttgtggggaattgttttccgggtagacggtgatagtggtatccttcgggaccattttcgtgataatgcaaacaccagggtacaggcggaaaacttcgtacataaagccgtatgtgtactggaatttctcgaagtcatccgtgtaattaagcgacgtgcgtccttcagcagctgcctctgcataaaccccatctacctcttgaataatcctgtcctgcaaatcctgcctgagagctaaggtgatgaagccgtaagtcatggcgtttgcggtggtttcataccccgcgagcaggtacagaaaaagattgccgagcacctcgtcttcgctgaaggcttgctttcgaccggcagcctttgcctcaaaggctgaagcacgcagaacggatgtaagaagattcccctttgcgtcggcagattggtattcgctgtctttgctcagcttcgcggtctccgtccggatcatctcacgcatatacttctcgagctcaccatgcgcgatagcgatctccttcattgatgtcatcttcataatccatttaggaatgagaagaatcttgaccatgaacgttgtgactaggtgcagcgcgtgatgcaggctcatcttgtaccccggaggaattttgttgcgaagatcagaaacttcagtttcgaagtctaatcttttgccgaagcccgtgtaggaaatgacggccagagtcaatcggttgatatcaagtgaaaggtcgcgagttgtgttttcctgggaccaggactccatgagcgcgcgtgcttggtcggaagcctcgttccagaccagatcgttagctccgctgccatcgttgaaggggggtgcagtaatgcgaacgtggaagttgtacgctttgccctctgtagttgcaacattcggtccatacggctcaaggacctctggcatgtggagttagcgaacgatgttccatgagaatagcgttaaacttactgtatttatctcttggttttagaaactcatttcgcctgttcatgacatcccagcacatgtcggcgtccgcggtgtagcagatgagaccctcaggcgatacgagaaggaaaacatcaccgagctcctcgtgaaccctgcgtttctcttcccaagcccagtcgagaatcgaaaagcgaatccatcgcggccagccctcgcctctagacagtcttgatgtgaacaagggacgaatgagcggagtcaagagttttccaaggaactcagtctcaagtacgggcacaagagtatacggcaggccggtttttttggcttgacccacgtagtacgccaatttgacaagcttgtaaagtatgaacaataatagggtcgtgcccacaaacgagcccagaggcaactttgaggcgttcatagtgcggagagtagacaaggaagcgaagctctctgaggatggatcaagtcaagcgtgaaagctgacagctggttggtctctctatagaccttcctttgtgcaaaaatgatacagtatggtgggagtttgcccgccggggggagttggtttcgagcttttcggtcgccggcccaggacacccattggaaatgcccgaacaagagctctggatcggcaccgcaggagccaaaaggaccatattgggacgcagatcgattcagtcctggtacgaagtatttactggtaggacggacattgaacacatcaggctgcgtcgcgttcaaacagattacttccgagcttacatagcctagccgcacacgtagttcggcccataccctgattagggaagggaaggttattgactagcgctgacatctgacctagaactttattcggaacttgccatagtagttccctccccgcgcatcgattgtaacttggagatgcagtcagcataggtgagagcttggggtagggtactagagcgaagatcgcccagttccatcgttgcttgcctaagcaccgccccaaggatggaacctcaaacgaaagaccccgaccccctaccgcgtctggtgcacataggcgaaatacagttcaacctgggcgaagtgaccacgggcggagtgacgccgcgaggaactttcattttctgccccataactggcggtgagttgaaatatagaaacacacattggacctggggctgacccaaaggcaggacactttaccaccgtctttccattaccggacggattcggcattcactcagaggcaatcgaaggtctgagggcagaggtgcttccaggtggcggcgattatccgctgatacataacaatgaacttgcggaactgaatgtcagcgtcgtcgccaaaggtctcaacaacgatcatatattccgtatcacctctttcggtatatgcgaatggaacaaactcatattcgatatgatgggccagacagccgccgcacgctcgacggagatgggggaaatcaacgcatggcaggtttttcgtatcaacactgatagcccggagtatgcctggctaaactgggcatgcatcattgggcaggagagactgatttacgaagacagtcgcatggctaagactcacatgaaattgttccagtttctggtaaaatagcgatatagagatactcaaattatcatctccacgacttgtatctaggctactataatcatgttcatgtaactggtgctatgtagatttcaatgatcggatgttaagcattgctcattagcatatagtccgcctttcatatgaccttgctcagacagattctctccaagattgataagaccctcgacatgttctactggaacctcggtcagtagatccacattcacgcactatggtccactcacctactcacacgtctcttcgcagggatctctgattgttgcacaatatccaatcaagaggctgcatgtggagctgcaccgaagcggtatcatggctgcgcgtttccaggcaataatgcctgtatatatacgacaagagctgtgcagagacaaccatagaacagcgagagccatttatcctgtcgagtgaacgggacgggaacttcgagactgtagacggcactgcgcttgggtgccatggttctggaaagacgattgcgctgtgaggctgcctataaattttgttaccgaggagaaaagggctggctctaggggcagtttaaatgtagtgtgagtctcaatttctcttaatatgagcgacttttcacgaagcccaaagtagaaattcgccaggttcccatactcggacggagccgagctgtttcgggatatgcagaacacgtgaatcacgaccgccatcttggagtccatttatcttggaagtctaggaagtacctgtttgcatccgcccatgcctatgttggctttacctcattcctcgaaacatcctgcttgtttatatactaccgcaagacctgatctgcctggcaacataagtactgtgatttgcatctcgtgtattgctgaacaagatgtacgagctacaacaacatcgaaagttcagtgcgttggatgaaatgcttccagcattttattactgctacttactttgctttcctgttagcagcgataacagggcgagcacgtccgagctcttgcaaacctccctatcctcgctggcagaagaacgcccatacctgactggtacagtccgaagggatatggaaagcagtgtgcgcaaaggccatctcatcctcgacataccgaatcccttcgaagaccttcgtatcgtattcaacgatctcacaggtccgaagtcccaatggaaggagacatatcaggatctgaaagacaccggcatgccgccacacaagctggatgcaaacttgttagcacccctgacagccggtattggagagacacggaaagtcatgtcggtgcaagccaactttatccacggcggactattgattgccttttgcttccaccacaatttcgtggacgcatatggggctggacgcattattgcgaggttttcagaccactgcaatgggactgttgacctcaaaaatagcgctgatccagagggggacggtaccgattcgaggggcatagcagacctcctcgacgttgaacttttgaaaaagcagtacaaattcgaggacctggaaagtgacccaaacctctggcggctcaactgcctcgagttcaggggggttaacgattttcggtggcccgatttcatccctgcccttcttccagtgaggaagccaccagtcatctcgagtatgttctcgttcagttcagacgctctggcagaaatcaaagctatggcacaaccgaatcaaagcggagcgtgggtgtcgacaaacgacgcgttggtggcctttctgtggcgacataccatgagagctcgctttccatcatcgagaaccgaaagcgagcccccaaaccgcaagtcaaacgtggtggtggcacttgatggcagaaaagacctttctatatcaccaacctacatcggtaactgtcttttccattgctttacggacctgccgatcaatatggtaggaagtgagagcacccatcttggtgatattgcgatcaaagtcagacagacgatcaccgcggcccgaaacaaaacgttgctgaaagctgtcgtcgggctggctgccactcacccagattgccagacaatcaagtacgccaacgacaatctggggcctgacctgtacgttacctcttggattgatctgccgttctataagcttgaatggggcccacttggtaagaccgagttcttccgcattccagaccgacaatttgaaagtctctgttgcattttgccgccaaaggatggggttgtccagttgattacatcgatggaggaagatcatagcaaacggcttcgaagtgacgcagagtttactagatttgcaacttatagatagccccatagatagccaatccgcagcatggtgtcaggttcaatgcttccctttgtaagtcggttattggctggtcagtcgattgaagcatctattcacacgaatattggaccaaaatgaataaccaatttgctttgagtatgaaatgttcccaaatgtattgacctcgctatgccttgagtgtgctaccgtccacagagtgaaatctgacagtcagggcaggcttgtcccacatgacatggaccttgctttgtccttcccaatccagagactgatccatcagctccatatcatatttccagcaaagtttcgaaaggatcaaatttagctccataagtgcaaaactgtatagactgtcagacgctttttgtaaacagctacggagctgtgccacttactttcgccctaggcatcctcgaggacccaagctgaaaggctgagatgattctttgatatcggtcgacttctcattcagccatctgtttggatcgaatttcatcgggtctttgaacatttggggattgtgcgtcacagtccatgcgctggtatagatctcagtctggcttgcaggttagatagaatgctcatgattgagaagaaactagtaaacacgtacaccttccggtatccattccccatcgattgcgagacctggtgatagtctcgggaaaccctgtgagccagggggatagattctgagcccttcattgataaccgcctgtagatatggcaactgctgtgcagaggtcgcattgattgactcataggtagggaagcggtttctgatttcttcacgcatagctttgtatacctccggagtcttgagtaggtagtacactgtagctgccaagaaagttgcgacagtttcgcctccagcaatgatgagagtggatgcatgagctgtcatctcctcgcgatcaacttcgccggactcaacctttgaaattagattggacatgaagtctttccgaagattcttgttggtcatgcgctcggcaactttgtctctggtgaattgagagtgcttatttcgcaccgcagtcagaacaggtgccaagaatcttgccaatgtcagtgcaaatggcaggcgccgcaaattgtccgcaacggtgataaagtaaagatgtttgagaatcatttcctgccagtagtgaggctcacctcggatgatgcactcgaaagattgcccaaaggccatctctccgagtatgtcaaacgctaccatttctgtccacttagtcatgtccaggccttttgtctcggaaccaccgtcgttgccaagtcgcgtgatgaaagcatcaacggtctgagagacaagtggctcctgctccaaaagggctttcgtcgaaaatgcagcagacagaaatgacttcatctgccggtgcttctctggatctctctcacttccaatgcagagcgagttaaaccccgacccgtacatatcgtagaattcactttttgttggaatcatgccccctggccggtggccgtatattgacttccatgaggacacagaggcaaatgagagctcgtttggagctactctaagaacggggcctttttaaaaaagtcagcagctgcttgcgtccgggcacggatgaacttaccgtatttctggtgcccagcctctatggatcggtggattctgcctttcaaggtcattcgcattcgccatagctaattgagtcagcgagaggaatagattgagtaaattgatatcttaccaaggtcgacctagccaatagtggtcccggaaacctggccaggggatggaaccagaggttaaagactatgaggccaataaaatagcagagggcctagccacttgttagcaaaataaagggcctggtatggtatgaaggatcgaggtgtatggccattggccaatgccaatgagcttactgctgcagagatgacgaatgggagcacgtaaatgctgtgggggggttgatcatagacgaataagagaccggggattggagatatggtcatgttggagtaggaaaatttgagttgcatgaatatgctgcggtaagaattcacttccagatagctcgagttactcttccgaggaaatcgtgtggccacttataaacataagcggcttcacctgttcggactcatgctgttttgggtcacatttgcctttaaaggtctatatccgacatggcgaaaagctgacacaacgacgccctgctaactagatcgccgatctctcttcggcgtaagcactactcccatcccaagggcacctcccgttctgggtaaattatccctgaccaatcacagcatggaacggcaccttcgattcctcacacatctatccatgtacgccttttggtcatagcgttagcggctcttcctggattttgtggatgtttggttttgttttttttgggttatgtcggtcgaagggccggcctggaggcaatgcaggcgtgctccgtgttattatgtcgtattttcgcccgtcgcgcagctgactcgcatatgcaggagtggcgggctgtgcggaccggtgcgaacgtggcgtcccacgagtggtgtagaacctgcttggcagggtagagcatctgcttactagataacgataatagagcgaagaggttagcgtatctggcttgactgtagagcgtgttactacaaagctgattattgggaggaggagatgaagaagaagaggaggagatgaagaagaagatgatgataatgaagaagaagaagagaagtcctttcttcttcttctcttcctcctaagaaggggaggagggtctcttaataccgccctaagtatcttgatttactaaatgtgacttatgcatctcccgcccgaatagcttcataatccctgccctacgtgagacgccacaataacaagtacatgtcagcataacagtctacatactataattcctggaaatttgagataataaagttcaaggcaagtgctcgggtctctacttattcacaaccctctgagaactgagatcacttgctaggccagaatgtttggaactctcaggatcgggtccgagaagaactctgtggaatttatcgagcatgccaaaggagaggctgcaagccgattaggaggatacgtcttctcacattccgcttgtgaaagctgccgattaaaaaaggtaaagctttcccgtactagcatcggttggtttgctaatataactcctctggtcaactagctacgttgcagtggacacaagtctggctgcgatcgctgcagaagtcaggcgatgaaatgctcctaccaaataggagccccgagcaacagctcgcgaccgaagtcaagatcacatttccaacccaacttctctaacatgagtgggacagctggcaccagcaaggctccgagccctctgggcaatgatggcgtcgatcgggagatcggcgggtgggaaatggctgagaccgatccgactggcagtgtagtgaccactaccgcccaattcttgaatagcgtgaaccagggcgaacactcgaatcttaacgacttgcgtcagggacaaagattcggcggtgagcttgactattccgaaaacgaacttaatgatattttcagcaacatcgcctatctccagccagacgatatggagacgaacgttttcgtgggtgccgcaaatcgagctgtcctcgatgccgaggcctttgactcgatgaccgagccagcaaattctatgtcggacgacataggcgacatcgcggcatctcaacctccatctgccgatgttcagtcggcgttcatggctttcgatcatgcacgcacctcgtcttcctcgtcgtcacaccaaagctccgatacctcggctagtgacgcttttatcgcaacagatttcgacggagccagatcgaggacagatccatcaacttgccaatgtcgaggatccatcctccgcgttcttgctgagattgagtcgaacattttatccgccagtcccagcaacatgtacgctattttgtcatatctccgtcagacaacggcagcaagcaacgacatcttgacatgtcgcatctgcaactgcagattaaagttcttcggacttcttgggatcattggcgagaagatcaccagcctctcgggggcaataatcaccgcattcgtctgccgcctgaaggagcaaaatgagtctgtggatttcggcaagtccgattctcctgacaagcgtcttgatcccaacagggcaatacaattgtgcgagtttcaagtccagtctctgcaggaattcaaagtcgtatcagctgccgttattaagttgcagttgaagtattctgtggcctttgtctctcgcactcgtgagcttgcgatatccatgaatcatcttgcacaagctcagagccttgagaagcttgaaagcaggctgaacgagctcgtcatcaagatgcaacgaatggtctcggaagtagactcagacctttgtgatatatgaggcatctggggttgttgcaggagcctgggaggattgcaggctacagtggatgcctacagagcttacggagccttcagggcctatatgtaccgaatacctgtccattgtagagcttagatagtcagtcaatatttgcagttaattcagtcagtcattgcgagcataaagagatcactggtcatgccatcagatacctgaaacacagataatgagtgaaactgacggacaactgggtttacaaagataacacgtatccagaaattatgaaaagagtccgttacttctgtatctgcgaggcacctttccgtatccggtatctccccgacttctttacgaccgacacgctcgagaagggcatgttccgacataaggctgctcgaggccatcaattttatttgtcatcctcatggggcctagtaaaataacctggagtgcagcgcctggtaaaagcagtcgaccacaacccaaagatttccccaattccagagtacctacctagcacttctttgcatacccgcagtcatggatgcactcgaggctccagagctgcttttactaccccacctgtcggccttgacacccaagactggttttctgattggagtgagtacccagcattcgtcactcgcaaggcagttctgaaataaaatacagcttgctctcgctatcaccgcatactgctactatagacacacacaacatccactgtacaagttcccaggaccccgatcggccgcatggagcaacgtgctctactgttactactacatccaaggtcgacagcccttcaagttgctggagctgcacaaccaatatggaagcgttgttcggacggctccaaacgatctctcctttaacacggcaggtgcatttcgagatatttacaacttccggccgggccatgagacttttatcaagagcgactggtatgatgggggcgtctttgcagacaaagctcattcgatcgtgagcgagcgtgaacctggcaagcatgggcacatgcggaagtatctcagccacgccttttcggacaaatcgttgaaagcgcaagagccactcatcgatgaagttgtaaacgagtttgtctctcagcttgacgtgtttggttcgaaaaagggtggcatcgacattgttgtctggtttaatttagccacttttgatatcattggctccttggcatttggagagtcttttgggggcgtcaaatcaggtcagtgctccagacctcatacatcgcatctatactcatcattcacataggtgaggttcatccttggatttcgcgaatcatcacggcgatcgggcagagtgctttggcagatgccttcaagcggtttccaaaattcgcgaccacattcaagtggttattcccgaaagcaattgagaagatgctggaagacacggcaggccatgagaactataccatctcactgattgataagtatgcctccgaagcttcacagggctatccgtggaactctaacaccttgatttaggaggttgagcaatccatctactcgcccagacttcttgacgcgcatgctggaaaacagaccagaagatttgacagatgtccagatcgcggcccatgcgtctgactttgtcattgctggcagcgaaacgacagcgacaacattgagctgcatcgtatactatttgaccaagaacccatcagtatatcagaaagccacgcaggaaatccgagacaggttcgaaagattcgaggacatcaactcaacagcagcttcgcaactcaaatatcttcatgcattagctctcgaggcgatgcgaatctatccacctttgccgctggccttaccgcgagtcgttcccaaaggcggagataccatcgacggtcacttcgttgcagaaggggtaactacagatccatatccatttggtttgaaccttcctaattcaaaacagacaatcgtttccgtcaatcctgtagcagcttgtctatctacaaagaactttgatgcgccactggagttcagaccagagcggtggctcgaaagtgatttggtcgatgatcacgaggcctcgcagcctttctcgatgggacctcgagcatgcctcggaaggaatttggcatggatcgagttgagtctgttactctcgaaaatgctttgggtctacgatatcgagcttttaaacacagaagtcgattagttaagggattccagaatggcgatgctgtggaagaagccaaagctaatgatcaagactactcgtaggcgagttgcttcatgataataacaagattttcggacgccctaggacgtcctctaatatctgaacgatgctatacttagacatgaatatattaatgtaatagatagacatgctacaattggcttacaattcttagctgactagcgggaaggctatattaggccttgacaacttacaaacaagggaagttctgtagtattcaaacccattctctggatctgcggtgaatctaagggaaggtcagccttatatatatatgggaaggaattgccacctcagatgcagctaaactcactttagccaaagatttacagttccataatgtgaagtgttggtctgaggaagtcttttatctttctcctgaattgagtcctcctgtctatgggctctaggaatatagctattcctttcccgctgtaaacggcgtttcgtctcggcaatcttattgcgcttagcaaaaaagtcctttctgcctataattacgtgtggcgcgggtggaggcagggaatttatttaaagtaaaagaacgcgatattagatcaaggtaccaagtaaaaggtttttgaatagaaggtgtgtgaatgattatatactattgttagcacacattctacatttatatctgagattttgagctcaagccgctcttaattagaagataaaaggagataacatcctgaaacggatggagttcttcgctatttcctgcgcccctccgtcatgatgtattttcttgatgagataaagtgctccggaaaatgagggcagcagcaatgctatcagcgaactaaccatcacagtataaacgaccctgtgggggctaatcccttctgggtatagtctgaggtgggcatcagtgttgctcactgattggacactgagcactcactgagcatcagtcatcctgcacgtgactgatctgagcccgtgctgacatctacccagtgagcctgagcctgagccctcacaaaagcggcagctcaaataggaaagccccacccgccagggtatttccggtacgtatagctacatatatgaatttttgttcagtcgcttcacattctgtggtcaggaagcggcctcttctgtcattggccataccgggtgtctatcccagtcactcacctactgtaaaacatgcggatagggacgggtactgtaatttaagctggatgtatcgtgttggcttagaattgtcattttcattctgttttgaatggccatattccctgagaagtccgtggcactaggtatataattacgaacctttgggaaagtccgtcaaggaactaatcgcccgccattcctcaatcgctgccaaggtctcagatgcggccttgctgatctcatcgcaggcatcactccccaagggcaagagagcaggcaggggtttcccctcggcgactcccgtggaggtaatgacgtcgtagataacttgcgcgcccttcacggggttacccagctgggcgccgttaaaggcggcgaagttagagtcggtggtattgtttacctcctggtaggccgatagacgcgaggactttgcggtctgagaaatattggctgacgggttcagtaagtcggtgcggaagaagcccggttcgactaaacagtggcggataccgaacggggagatctcacccgccagcccaagtccaatccagcgcagagcggctttggaagcgttgtagagattgcagccaggcatagggtaccaggcggccatagagccgatggtaaccaaagtgcccgaccccttagcgcggaggtgtggcagtagggcgcggtaaaggttcagagggccaaaggtattagcctggaactgacgctgagtctcttctgcggtagcctcttcaagcatgcctgtctgcacgtaggcggcattgttgacaacaatgtcgaccgttccatagacagctaggatagtctcgactgctgcttggatctgggctgggggctcgttgtggtctaggtagacagccttgatattagggttagttgactcgagctcggctaatttatgcggagtccgtgtggcggccaacacgcgatccccgtgcttagcggccactttagccaactcttggccaagtccggacgaggtgccggtgatgagccagatccgggaggtagtagccatgatggatgggtagatgatttgttctcaaaggatggtattgaggtcaggaggggtgtgctgctgggaggaggggaggaggacatctatatatcatatgggccgatgccatccggtgcgagtactaaactccgctaactgcgaaacaaagatactggctccatcctaaactccggtaactacgaagcaaaaagagacttcttacatcctagtcaagttaacgtagcctgataggtaaaacgatgaaacgaagtgggttcgacaaaagtccatcagtcgatgctagaataagaggaaggtcgtccgagactattgcactaaccggaatcctgctggccccatagtagtagttatggcaactgggccaagacctacatattatacagtgtttgttgtatagtatcggagcgaaggatgcatgtctatcggctagtattcaaaccggcaaactagattagacagtatcaacgtgagagctcatcttaaagacaggcagtgctgtttcccggataccgtgaggacagtcaccgaaaaacaaaattatgatttctactgtttggttagagcgtcctgctcctctgcttaggaacagtaagcgcaggtacgttgatgagcgcccatccgtagatcgactctagtaaccaagtggcccgagcgccagcggggagagctccgaaccacaacgtccttccacccgtctcaattaatggcgagccgagatggcgctgacatcagtaagatgccgaaatttcatactgatggatcacagctgacagaagcaacagtggaaagcattcaacttcatcgacgtgtcgccggtgaagctaccagaggacagctcctcaatcttcgatgtaaggcctcgaccttcctctgctctagcccacggcgtatctaactgtcacccctagagcgacctctcgagtatctgcactggctccgcgaacctctttgttggcactaccgatggatttgtccacatcctctcctcggccttccgcgtcgtgcgatcgttcaaggctcacgataccggttccattacgcacatgcgacagataaacgataccgctctgctagtgaccgtcgcggaggatctttccaacgagccggttctgaaggtctgggctctagatacggagaaaaaagatggaggcccggggtgtctgtcaacggtctctgtacaaaatgccaggaggcagttcccggtatgtttggcatccgaagcgggaataaaatggtcaatacttacttataatggtatagatatcggctttcgcagccgtcgacgacctctcacaggtagcagtgggtttcgcgaacggatcggtgacgatcatccgaggcgatttaatccacgaccgaggcgcgcgacaacggatcgtattcgaatccgaggaacctattaccggactcgaaacccaaatcggcgctgtcacaaccctttacatttcaacaacgagtcgcatcttgacattggtcatcgccgggcgagggcagggccagcctgcgcgcgttttggaagatacgggctgtggcttgggctgcatgactctggataaagagggcggagatgttctaattgcccgggatgaggcgatctttacctacggtccgcgaggtcgtggtgcgagctatgcgttcgagggcccgaagacatctattgatgcttttcgtgactatgtggcgctcgtctgtccgcccaaggctgggactagcaagtccgatccgctaaggaaatacggtgctagtcccgccgaggaaatttttggcacgactacgttcacgcttctcgataccgacctcaagttcatcgcgcatagcgaagcgctggcgtcacctatgaaacgtattttcatggaatggggtgacttgtttcttcttacgacagatggaaaggtatgtgattgatatgatcttgtgttcgtctttcttctaaccggttctagatcttccgttatagggagaagaccctccagcaaaagctcgaaatcttatatgagcgcaatctctacatccttgctattaatcttgcgcaaaagattgggattgatccgctccaacagaatgctatctaccgcaagtatggtgactttttgtaccagcggggcgactatgataccgctatgcagcagtatctccgggccattgataatacagaaccttctcaggtcattcgcaaagtcagtgagaattgggattcggcattgttctcgtactaactttgatgtagtacctggacactcaacgtattcacaacttgatcgagtatcttgaagagctacacgaccatggccgtgccacggttgatcacacaacgcttcttttgaactgctacgcaaaactcaaagacacaagcaagctagactcgtttatcaaagctcctggtgagctgaagtttgatcttgaaactgccattgcaatgtgccgtcaaggcggatactatgagcaagcagcctaccttgcaacaaaacatggcgagaacgacatggtcgttgatattctaatcgaagattctaagaagtacgctgaggcagtggaatacatttggcggttggatgctgaagtggtatgtctaaactgcgtctgcgtcatcgggggaaacaagctaatatgtgctaggcctatcacaatttgatgaagtacgctcgagtattgctaacacattgccccgagcggacagcggagctgttcaaggtttactattctggccagtaccgaccacgcacggaggtagaacagaaaccagagccccaagaacagacgaccagcacagtgcaaagtcttgctgcccttcttcctttgcggtatatgactgttggcacacaacctacgcctgaaatccctgagccagcggcaaatgaagacaagattgagaattcgacgccagattatcacattcccaagccccgaacagctttctctgcatttgtggatcatcctaaagagttcatcgatttcctcgagaccttggtgcagcagccggacttgaagaaggacgccaaggttgatcttttcacaacactgtttgagatgtacctggacacagcaaaggggaaaaaggatgcaggcgaaagacaggaatgggagacaaaagccaagaaactaattgaagggaaagacgtaagctgtcccatcgcccattcatcgccttatatctaacccacctagattccgatctccacatccaacgtgcttctcctctccgatctgtcaaatttcaaggaaggatctacccttgttcgcgagcaagaaggtctccgcctggacattttccgttccttcacttcagcaaaggatacacagggcgccatcaaagcgctacgccggtacgggcctgacgagccccaactctacgtcgacgcattgacatacttcgcctcgagcccgaagatcctcgaagaagcaggcgacgagctagacacagtcctgcagcgcatcaaccaagacggcctcctctcaccattgcaagtgatacaagcgctcagcaacaacgcagtagtaacaatgggccgcgtgaagaagtacctcagcgacaacatcgaccgcgaacgcaaagaaatcaccaccgtaagctccttcaacaagcccctcctgttcagcgaatagtaaagctaacccccatcctttctagaaccgccggctcatcacaagctataaatccgaaaccgcaaccaaacagcaagaactagacaacctagccacccagccagtagtcttccaatctcgccgttgccaatcctgcggcggaaccctcgacctcccaacagtccactttctctgcagacactccttccatgagcgctgtctgaacaacctcgacgacaatgcgcagtgtcccgtctgcgcaccgaagaatgcgactctgcgcgcgatccgccaacggcaggttgattccgcggaccagcatgatttgttcaagggagagctgtctcgctcacgggatcgattcggggttgttagtgagttcttcgggaggggtataatgaggccgcagagtactatggagtaggatgggtggaatggattgcactttgtttagatacgcttgttctcattcttttcatgggcgtgttttatatggagctggttttcttcttttgatacctcgatctttgtcatttagatcaagttgtttctcctactggtgaaggtagtagatagtagatagaaataagcagttctttacacatgcaggtctttacgatagaacaactacttggaacaaagtactttggaggcaaaaactaggactatggattatgtccatgtaaagaaatcattgttcagttaaactcgcttcgctctagcaagtaacaacagcgagctaaggacaaaaaaggaattatatgaactcgataaaatgagcaagtcgatcacggtgatcaagcaaggtcattagatgcaaagagcaattaatatgcacagctgatgagataagaaaatacatgaatactgtcgaggcaaaagggtcgaagcaatagaaactgggtagatacatttccattattcactcgagtcggcaggagtgcgacaatgtctcctttgtatggccgaggacgacatattagagacgaaggataggatagacaagccaagtcgagattcttctatccgattgactcgttagagatcgatctcgcttaaagctcgcgtcccttctcgcctccccatgaaatacgcgggatgtgtcgggaggtagattgggagttggagccggatccagatccagatccagatccagaggactgttcagatggcttgtgtgtttcgccgggctggttgtttttcgtattctggcttgattggccagtctcgttctcttcaatgtctgagtcttcctccacgatggcattatcatccgaatctgagccatcgccattctcggactcctcaccttccacacctaaggcgtccagacggcgacgacgctcggctggggtctcgcctgtgtcgtcgtcagcctggcgtgggggcgcagtgagaccagcggcttgacggagacgcgaaggtgggatacgctctgtaccatcgtcgtcggaatctcggcgaggccggtcccgtatacggggtggcgcagggctgaagttgttgcggcgttcttgggcggcggaggtaccaacgccacgcgagaacctcgccagtgaggcggccacgttaggggaaccatgatggttgctagactcgtcgtcactaacgtcgctatcgctgatggactcggaatccatagcttcagtgtcttcttcggggatggtgttagcggcagggtggcgctcttgctttccctgggccttggcttcttccttggcttcgtgctgggccctttcttgaactggtgctggtgcgtcggtttgctgaaccagatcccggcgggccttggcgtcaagacccttcatctgctcgaagaattcctgcttgttcatacgtcggcccttgtggccaatgccttgagcgtcgacttgcggatcctgggccaacgtgaatcgaatgccgtcgtcggcggtccaatcgttatctttattcttttcgtggccagcctgggaagattcgccttcttcttccatgccgagccaggtccccatgcggttcaaaccacgtcgaacaggagcctctccagggacggtggtctccttctgggtcttctcacccttttcacccttcttgccgccaggaagggtataattcttgatcacctcaccgtcctcatcctcaacaataatagtgttgccgaattggtatgcatgagctgaacgaggtttgggcttttctttcttttcggtctctgccttctcctcttccgtggctcgaccctttccaagtccggtccacttggtccacttcttgagagcgtttccatatgacctaccaaccttctcctcgagctcatctccctcggtctttgtgtggggttgactctccgatgctgcaaattctcctgatttatctttttccagacgcttgcgttgcccttcaatgtggccagtcttctcttccggagacatatgagaggtatcctcagtcgagagaacattgccctcttcatcctcaatgaccatgtcgtggccctcttgataaacctctatctccggttcacgaccgaatcgatcgcgctcggcacgaggtggagaagctccacgctcagcctgatcgcgctgatcaagttcttgcttttcttcggcctcggcctcggcttcgtcctcggcgcgccgagaagcgggcataatagcagactggctaattgggcctccgccaccagcggcacgcttacggcgacgtctccgcaggggcttgcgacgagaagactcgaggttttgtgactcactatctccctcttcgtcacgttgccggcggaggaagttgccaggcatgccgatggggggcaaggtaccgggaggatactcaggaagcttttcgtccgatgaggcatctgtatcatccgtcttacggaaggacatggagcccttggcgattgactgcacacgaggaagacggttcatccatgaaggtccctcctcgttggcctgtgtgtaggatagggtgatagtcaaggtgttgatacgtttacccagagtgaaaactgcaatagacgaaccatgtactagaatagatgtgatgaccatgaatgtagtgatgggccagataagcctgacaacatagtaattgctggttcctggtattgggagctcgtcttcaggcgatggttgtgtgttgtcgttctccagctccgctcgagcgaggatggcggcgaaaatggcaccgacaccgataggaccgaaatgccctgcgaataaagcttctcgccaagttttgacgtccggtattattggcttgagcattagcataatgggaatacgtcggaagaagaggaccaatatcgcaatcaccaccagccgccaaggagtaaggccgagctcgggggagttgtagtcctcccagggaatgatggatccgaaatagacaaagtatgccaagttgagcagaagatcgataacgttggagacatgagattcctctgtcttctccgtaaaccaaccatcgttactgaatccaacaccacaagcgaatccgatcagcaggtcgtccatgcccagcaaagaaccagaaccagcacagaatacagccaacacaaagtagaatactaggaaactctcacgatcgatcaatcccttgcgctcagccaacttgatcgcatggcgagcaaaatagccgatggcgaagccgaaaatagcacccaagatacactcgtacaaaacggtgatacagaaccagtttagccacacctcgccgacttgaggacggaagtgatagatgtagaatgataggtagatgaatgggaaagccataccatcgttacacccggactccgcagataacaagtcacgcaaatgcttggggacacgcttggcgaactttcccttaccaacgactgacgacgccaagacaggatcggtagccgtgacacaggcagcacacaccagagactccagccagttcaggggaggcaccatccaccagataaacagactggtcattaaccaaccccacgtcatgacggggatcagcagcaaggtaaccgacttccaatggcgttccatgtaggcctttggcaactcaacgccgacggcgaaacattgcacgaccaggacaattcgcgagcactcgagagtgattttgtcgacgtttccccatttatgcggattgaacaaatcggccgcatgggggccgaaaatgataccacagagcgtggctacggtggcttcaccgatgtacagcttctccttgacgaacaaggagcacagcatgaacagggctgtgaaacctcccaggatcatgtaagccacatgcggcttatcgatgtccagatgatcccacgccatggtgaggatgtcggtgattgaacaccaattgtattatatccgggaacttttgtaatattccgtccgcttcgtaccgcaacgagcaaatttaccggatgatttccgccctcgaacttcgttggtctgcgtagctcttcatgccttggtgaatcagtgattgaacagccaagttgccgagccttgtagggctgaatgaggtaaggcgattcaagagcacgtccgatcggtttcgcggtgggtgacggtgcagattgtggggggtgcagactgtggccaagatcgtggggatgtcactggggcggaggcgaagctagataagaggttggagaaaaaaagaacccaggcttggcctcagggaagtcaggcacaggaagggggagaagaggagagagaaaagatttttctagacaggagcgaaattcggtaagagtcttgggagctcttggccaagcagaagaaagcgagtcaacgcgcgcttcgggagatttgcccagaaggaagtattcttggaaatggcgggattcgtcagccgagacattcaagacccacgttagaagcggaattggtcttggcttagcggaggactgaacgtgcaatagactaggatgtctataagggaatgaggaaaggtcctgattctctggagatatcggagaagaatagaaggagaagatcagataataatccgctgcatacggcatgtgtctctgatttcaccggaacagttgcaggcagtgtaagattcgggttctgtacggtaatggtattgtaacattaagatcggccagccctgtcaagtgccaagaccgaaactgggtcggtggcgtttctagcttgtgcgcagtgtatggatatggatagtctagtggggctcggggcacatttatgatatcggtctggagtggatactggtatggtatggtatatacagtacacttagtaaaataacttaccgataatccatatctgctatgaagtatggaatgtaggactgcccgtgtagagttagtatacagagtacatagtcaatatagtacacatatcttggaatattgaacagaagacaatcaaattgggaattgtgagtaaaataaggcaaatcaaacagttcaaggattgcaaactttcaggggaatttgatgccgagaacccaacatcgtaaaacacgcgcaaggattatttccggggaaatatggggagaaaaaaaaaagaaaaaaagcaaagattgcatcagtgggatgcagtatgcacaccgtgcactctgcgcgtaccccaaataagacagttgccagtccacccgcgggctgttatgtacgatgggctgtacgagtacgacctgtaaccacgcccaatgctgccctagctcgtcggcatcctctcaacttcgtcactcaagccacgccaattgtccgcctgcagttcggcgtacttgacacgctcctggctccagtcctgatgcagccggctgatgtgatactggcttcgctggaagtgaacgagttcgtcgcggatgcattctgtgatgaagacgccccgagcatgctgttgcacaatggattctttgtcctagtagacaatcaaggttagtattactgtaagtgccattgaaacatgagtctcaccttgaatatagagtcttcaaccttctcgatctcccctggtttgacggtgcccgagggtcgggcacgtagatcctgcagcttctgctcactagtctcaatgcgccgttccagctgcgcaatattgttccgtgcataccgatcccgccgatcgaacatttcacggacactgaccaagcaatcgcgttgctgctttagatcttctagaaccccctcgctccatcctcgagcttcgtcctccagcagactttggctggcagagagatgtcgagcggtcgctgtgatgcctgcattaagggccggaatgtcattggtatccactgcgtatgtgtctctggtgacttccgtcaaggactgcagggcgagtgagaaccggaggtggtcagcagccagaccatcatttcgcttagccaatcgctcaagtaaagtgcaaagactaatatagatttccgcagagcgcttgacaccactgcgaacggtttcgaacgtttcgttgagagtggcgggtaatgagtcctcgagatccggtgggaggacacggccaacaaattcgtcttggactgatattgtggcttgttttcgccacaccgaaagttcctggtttcacagttattgtctgtctcccaacaacccaaaaggtagcttactgttggaacggtcaaaaacatgatcacaagctgctcctgaccaagaacgggatggcgaacgagggcgttggtgaatcgaacaagtccgtgacggcgcttttcgaggaaagaggatgaatccgctgaaaggtgagtgccattgacttcataattgtgagtaagcgatgaggtgcgctaaactagcgttttgcatacctgaaacccgcttggggggaagaagaggcaattgccggaaaggaaatcgcttttggaggcagtccaatagccaaacaaaatcgctgtaacgccgaataaccgtgctacctctccgggcagacttaacctcataatttcggtgttgaaacataaacaagccttctttctcggggagcaacgtgacagttacggtctcctctacctgtgggtttgtcgaccggccgataccaagagaccgacgtcgtggtgtgatgtggcggggctcatcctctggaccaaaaccaccgagtgctggaggcaccgtgcccccaaagctgctttcatcgctcggacccgctccgctgaagtgattgttatcccatccagacccaagactgctaggctgtacagcctcggtctgaccattggaatgctcccgctgaaccacgttgctttgtgtggtgtcttcaatcgccttgctagtccacgcgttcgtagtggacctcacactgccgaatccattcgatacacgtggttcgatgcctccgcctgtctcatggccgtggccgtggtgcaattctggactgccccatggatctgactccaatccgcctaatgacgctcgtcgtaataacctttgcgattgtgcggagccgggggtttgcaagggagaggaatggtacgagggagtagcaggtcgctggtatggttgttcagagttcgcgtcgccagtctttcgtagtcggtcgaggtagccagcctttggctggggtagttctgcattaactctgcgttagagggattatcccgaataataaataaaaatatcaaagggcgcaaagtcaactcacttttgcggcgatcgtccactgcatcaaaggagagttcctcgccttcttgcgctaggcccaccatcgccaatagcacattgaactcgccacgaccgagtccattaaagctttcatgatcaccagaagcaacaaagttcaagattttgctttgatcagttgcagtgagcccgctgcttgagagaatctcccgcacagaggtcaacccaatgccagagccaaccctgtccccgctattcagaatcaagtcgtatgcgtctatatagctctcaggtacgtccgtattgggaagcaatgtccgagccagatcgcgccgggcagttcttttggcgatattgttttgggcattccaaggagaggagctgtcgtcgccgtcgtcatcggcgaacagcgaagagccgcccgtagccggctcgtcagcaaacagcgaggacttggacctcgcaggatcacccgcagagggatcctctggagatgtgccgaataaggacatcaggaaaccgacggggtggtggttgcgccaggagtgctgtcggggtcaggtgtggaggtgagggcgatgacgatattggcgatcaagcggagctcccgaggggggctggtcgcacgaatatacaagccactttcgacctcaaaaagaaaatcagtcctggagacactgcgattctcaaaaagctgagacgaaaagcgaattcagtgacgattcaagtccaacgaggtgagagagataacgggccccaatgtcactagtaccgtgcccaaccgagttagtcaggtcaggcgagttgtaccagctacaacccactacatacattgtgaaagttgaatttgggaagatattactttttccttcattctggtcctttgagattcgtctcattcaaatcaattaacgtcttgtaatatattctaaggcattggcgttatcggagatcaacatcgtgagagtaagggatgtctctcttgaacttgcacgtttcaacatcagtctatgaactttcgaattcaatcgttcaaggaggtcaatcaaaagagagaatcaggtctctatgacattgtggagctcgcagagaatgccgatacttctataccccgaagatatgatttgatttgcgtctcttatcgaacgaacatccaacatcggatggctgctccgatattggagcttcattgcaagaccccgtcactgctgtacagctccccactcggaagacccccccgatggctagtataccgaggcaatgtatgaatatcatatttaacagcttatctgccggggtgttgacaaattgatcttgctctaactaactaacattggccgaaacctgtgttcctctgttctcattccaacataatatgcgtcctgttactattactcgaggagcgaggctgaattgtctcaagcctcgcactctagatagatattcaaggcgatacttgaccatgctgaaccctcccaaattcgagaatgaaaagatggtgagcaatatcaaagtacataattgaactttgactgacacaaatcagctcaactacgccaaaggttctccagaaagagccgagttgaccaagacaatcaagaaactcaagggacaattcccgttcacaattcctatcactatcaatggctcagaggtatgttaaaaatcacggataccaacttgggacatgtaactcacgtatactagatcactactaaggaatcccgctcccaaccaaacccctcaaagcacagcgaaattgtcgcgaactacgcctctgctgccccagagcaggtcaacgcttccatcgatgcagccctcaacgcaaagcccgcatgggaagctacccccttcgaagatcgtgccgccatctttcttcgagcctccgagctcatcaccggcaaatatcgctcagaaatggtcgcagccacaatgcttggccaaggaaaaaacatatggcaagcagagatcgacgccgctgccgagacggccgatttcttccgccactatatccaagaggcatgggcgttgtactcccagcaacctagggtccaactcgatggaaactggaacaagatggagtatcgcccgctcgagggtttcacatacgccatttctccatttaacttcactgcactcggagcaacgcttattggacctgctgcattacttggaaatgtcgttatctggaagccttcggactcggcgcttcatgctagctggttgcttcatcaaattttgcttgaggccggtcttcctaaggatgttattcagtttttgcccggtgatgccgagcaaatcaccaacactatcctcaagagacctgagtttggtgccctaacatttattggagccactgctacgtttaagggtatacagaagaagatcggcgatggcattggtgccggtatctacaactcctatcctcgagtggtcggcgagaccggtggcaagaactggggcgtcgtccatccatctgcagatgtgagaagcgcggctttgaatacaattcgagcagcatttgaataccagggccaaaagtgttctgccaactcgcgtgtttacgttgcagagtctgtctggcccgagttccaaaaggtcctggcagaagagaccgcagctctcaaggtgggggatgtcgaagactatagtaatttcattaatccggttattcacgagcgttcatttgacaaactcaacaagttcatcgaggatgcaaagagcgactcggagctggaccttatcgttggcggaaaggcatctaaaacagagggctattacgtccatcctaccgtctatcgcacctccaacccccaccacaagattttgtccgaggagctgtttggacccattcttggcgtctatgtttacccagatgctgaatgggagcaaaccttgaagctggttgatacaacatctcgctatgcattgactgggagcatcttcgccaaggacccctatgtcagccggcaagcgcagactattctcaaacacgcggctggcatgctctatttgaatacaaagtgcaccggttctactgtggctcagcagccgtttggtggtagccgggactcgggtacaaatgacaagactggcactatggcacatctgcagcggttcgtgagcgctcgcacaatcaaggaagagtttgtgcctctcgaaaaagtcacatatccttcgaatgaggtttaaggagggaaaatttagatataatctatgacttcgaacgatataaattgaacttctgcatatctctacgctgtcttgaacatatatgttggcaataattcgacgctgatgcaacaacaataacaatacttcaatgtctttcgatattctttcgatatattttacgtatcattttacccccgtatgtaggtgagagtgaacatattccgatactaccgatgggactttcaaggtgaggtccggggctggaaagcgacttctgagaatcatcagatagcactgagttaacatcggaacgacatcaccgaagcaaattataaatgtacgcctgataacactgaaggtcaaatagtgcataatgaccatcactggccaaccccacttaggcacgtctatctatgaaacgtaacgcaaactaaaatacaacctcgaaccgggccggtgctggaacttgagcaataagactcacggagctgcctttctaccctatttacgatagcacaaatccccgcagaggcaacgatgagttggcatcgcgggacaggattccttgtccgggaacccctccttccatcggaggatgactccgatgcattaccggctgactatcagtgaccggatagttggttagatagtagcggtctgataaagtaatacagagatataagaagtggttgcttcaaaagtactctgcggtaccgacctagcttgaacggaagttattgctggcctgaactctttcatacaagacacaagcgcggcgctagactcacctgtctgcgttcttgactataaccaagatgttatctcgctctactcttataaaacctcctcatggtttatcggtccaagtctcaccgaacttagctcgtcgacttcattcgacaaaatctcacttccatgatgccgccatgccagcaatcaaaccgcccgtcgaagtctcatctatggcccgaatcccaacgaaactcttgctacggtctttgcttttgacttccttgatgacatccaagttattcttacaacctgccctagccgtgatgggcgtccttacgacatcgaaatcaccactattgaacccagatcagaacctccttctgaacaagtttcttcgctggacggtttataaccacttttgtgctggagtgaacagaaaggaagtctcgaagactgtggcagatatcaagaagatgggatatcaaggtgtcatattgggatattcgaaagagatagtgctggatcatgaggaaaagctctcgaccgacgaatatgggaaatcacaatacagcgacaagtgctatcagatgattgacgagtggaaggagggaacattggagacactgcgtatggttggtccaggtgacttccttgccgtgaagtaagtgtgaagccctagattcttgtcctatgggatctgatattcctttgctaggttgacaggtgccggtcctatttcagtgaacgcaatggcagcgcaaaagcctatgccagaggctatggtcaaagccgtggatgagatttgcattgcgacagaaaagcagggctcacgtctctggttggatgcagagcaacaagtcttgcaaaagggtcttgacgactgggcgattgaagtgatgcggaaacataacaaatcgcaaacaccaattatttataatactattcagggctacctcaagggatcaaaggtgaaccttgaccatcatcttaccttggctgcacaagagggctggactctgggtatcaagttggttcgaggggcatatattgagcatgaaacacgctctctcatccatgatacccaggttgatacagaccggtcctacgatctcattgcagacaccatgctttgccagagaatgcctgctggcaaggagaacctcccattccctaaggctgctcttttccttgccacacacaacgccgctagtgcaaccaaagcgattgccacgcaccaagataggcttctcgccaataaacctacagtcatgctggaatgtggacaaatccaaggcatggccgacgagctcagttgtgaacttgtgcaaaactacgaacgtgctctcgaacaatcatctgctgccaacttgactgcgccaaaagctttcaagtgcatgacttggggctcagtgtctgagtgtatgggatatctccatcggcgagcaatcgagaatcgcggggcagtggaacgaacgcagcacatggtgaccgcattgcgtcgtgagttgtggcgaaggatcgtcggatgagtcccgaagacattttagtggctaggtacttaatgcacaagatagcgaatcagactattgttactcaatatatccatgcgcagttcatgcacgaagccgaatagatcaaggcgaagtcaatcctgttagggtctcaccaatcatgtgatgggtcatgatagacggtgcgctgttatctccgataagtaaagtcggaagcgcatcccgacagattgaaccaactatctcgttcctaccccgcagcctgcaacaattgatatcggacagtcgccccggaagcatagactatcttcatacctattctatacagcatctcggcgtcctaatccggtatgcctataacacctagccaggcaagaacaaaaaagtgccagagggcgtaagtcatcttgatcaattggccccaaaatagaatacctaactcacattttataacaaagctgtgagcgatgtcgatcaatgaaggtcaaatgctcaggggtcagcccttgcacaagatgtgcgcggaagaagaagcattgtcactttccggtggaggaggcccgggtctccgtgtcggaacggtaagtagcgccaactagctgcactatacgtgctaatatagaactaggtacttgcgagagctagaggagcacatatccagaagcggaagctcggggcgacatggactcccggcaactcttgaacacagtctagggggtacactgtttacaggcgatgataatgttgatgttcctccgacccctcaagcatccagcacactgctagacaatcaagcagatattggatggcgttcaatgtcaatcggtatgctgtagccattctttcaatatgtgtctggtgtgttgatcatgggtcgttttcagggatggggccgtccctgcataccccagggacccctcaaagagatcatgagaccgacagtgaacaagacaatcaacgatcaaggttctctcgaaatcctttagtggaccgggatccatcgtttgcccaaacaccagatggccgattttgtgagtgttgagtctctcgtctcgctctctagctccttactgactgggatatcgaagggtatatggggccgacatcatcgtggtccttttgtcgtcgtgtccttgctttgataggaagaaaggtgccagaatcaaactgtccaccagatccatttcacattgatggtgtggctttcaggttgacctggcgaccatatcctcccgatgaagtacctgatgtcactaatctgccaccgttggactatgcactcttcttattcaacacagtcaagttctatttcggctttctttcttttatgattgatgaacatgcttatttgcaggatctccatgaattctaccgggacccaccagcgaaagctgcttcgaacagaccttggtactgtcaatacttacttgttcttgcattcggaaaagcattcttgacgcagaagaattcttctggaacaccgcctggtcatcaatacgcatctcgggccatggcactgttacctgatttgtcaggagttgacgaagatcccttgggttgtatacaagcacttagcttaggggcagtatatcttcagtcaatagatatgcgaagagcagctttccaacatgttggtttcttcatctctcactggtactgaagtatctaattatgtgaacagattgggcatgccttacgaggctgtatcatcgaaggaatacacagacatgtacccgaagatatatgtggaccggagctctccaaacgatgcagaacaatattttgggtggtttatatgttggaccgagaattttctgctttgattggcgccccaagttcaatcagagatgaagatatcacagttaaactgccagcagagatggatgattcggtagaacagattaatttgacattgcatgttcggctttcccggcttatggccactattctgacaagtgagtcttttggctgattaggttggatgcagtgctaacgaaatctagccgtctacggggttggaaacgattccgatgacaccctcgttcgaagcacacagtccattcttcatagcatggccgaactctcatacgacctgactgcctttttaaatgctcattttcacgggttaattagccgcgcttcgaagatggcgatccgattgatgttagcccatcatcatgtgggttttttccgaactactaatctcaacatgaactaacagcagcagtgtattgtacttacaacaagaccgctagtgatgtgcgcacttcacatgcacattgaacgaacagagagacaaaaatcccaaacgatcgtgttagcaccgcctgttgcatccctcttacaatgctgcgccgattccgcccagactatcctccagacccttcgtactttagctgatgatgacttgatgggtatgaatttactagctgttttgaatcacattaatactaattccaacatacagacgcattcttaccattccaaattgaagacgcatcgtcctctgcctttgttctctacctgatccgcgcgattgccccatcggtgatctcgaacgatacttggtgtgacaacctagctttagtgctcgataaactcattgcaaagggtaatctagctgcaccacttcgcaggcttgaactcaagcaattagagcaaatactcgcacctttgacgccaaaattggcaaatcattctttgccgcaagctaacctggatgaatataatgaaattaatgaggaaccctatagcttcgatcacgaggagtttgagtgggatctactgggactcaattcatcagtcagtctcccaccgcgggaattattggatcttgcagatcaattagacgtggaggggatcatgcaatctgttggggtttgatgtcttgcaatgatctaataaactatacgacttttcacaagaattcatgaagttcaaaattgcagaacaagcagagtctgttcttttcgtacgcgaagcgaatttggtctagtttacgacagtcggagggtccttgttattgatatttgtcagaatcaaggacgaaaaaatgacggtattcatcctagattctgacaatattgcaactagaaacttccttgttgactccgtcctttcgatcttatcgtgaaattgtcggaagactcacccgacgtttcttcagtatctcaaaagacatatcaaatagttgaaacaagcatcacggtcgcatttaatcttgttgatctacaaattctttttattcctctataatgtctcgtaccagaacaattggctgctttatattcaaccagtatgtcaacctttgctcgcaagcccggccagtatctaatttgactccaggacttggaattttactccgatcttacctcgcattgggtgccattcattgcaccaactgagaatgagttcctcagcaacggccgtggcatcagatgctgaaaccgcaacggcacaaaaaaactaccaagtagtccaagacactggcaatttcgacgagatccaagccaaacgcccagactttgatcattctaagcccatcgaagtaacaaaatcgccaaatcccaactgggagtatgggcaaggggtacccgacaatggagccagccggacgcaaaaacatcatgaaatcgacccttacgcttcagatcgcccgatgattaacaactaccgcctccttgtctcggggattgcgcctcgaccggtagggtttctgagcaccgtcaattccaagggtcaaaagaacctctccccatttagttacttccaagtcatcgaccacgatcccccgatgttcattgtggggttctcgtctcgacccggtcgagtcaaagacacctaccgcaacctccaagagaccggggagtgtgtgatcaacacggtgtcggagaacatgatcgaagcagtgaacgcaagctctatcgatgctccatatggcgtgtcagaatgggatataaccggtctacatgaggcgccatcgagtactgtaaagccatctcgcgtcgccgagtcggtgttcaacatcgaaggcaaggtggttgatatcaaggagttcacggatcaccaacagcctggcatgagccttgcagctactgttctcattaaggctacccggttctgggtcaaggagggcacggccaatgaggattatagtcacattgacttggagaagttgcggccggttggtcaacttgggggaatctcttatggtcggattgcgtcgacttttgagcacccgcgaaagaagtggggtgatgaggtgccgaagagtgagatcttggctaagctagatgctgctaggcctcttgaggaatgagagatcatattggtgcctgaggtgctattgctagcgttgtgtctcaggtgccagcgcctaggcatagttaactaatttcctacacagtcaaacaaagcagacttcgaagagtgttccctggtctttatataatagcatatatgttaactatatatactactattaattaacatcaaagatgttaacggcacgtagaatgagggatgtaaccccatattttaaccagaaaccaatatcagccacccccttttaatctcttcgtcgggacgaatcaacttcttcaattcgtacggagaactccgcacatcgaatagggttataagaagcggtacacaatctggaacaccagcccgtttggtttgtttctgtttttcttctctaagacattgtgtgattcacttattattcacttacttggagatttctcgcacacactcctttatatcccttctgatctgagaacccccttcactctttttatttcctggttctcatcaaatacattctttaactttgactataaccgaccaccatgctccccacactccttaccgtctttcgtcgcgactgcaatggcgacgaaaccatgtccagctgcacaaagcccaccagctcagcaataaccgttggcattcccgccgcgatatcaggggtgtaagtccattgatatacttatactatcgcccattcccaaccatggcagaactaactatatatcagtctccttatagtcgccattatcgtcctggtagtcctataccacaagcgcatacgtcgcgatgaccgcgaagacctagaagatcgccagcgcagctctggcttctatgctcgctacgcaacacagagatttggcacggagggaggaccaccaccatcgaaaggaggtgcctatgcttctgagtcgcggcgcagctctgccgattcaatctttgatttcaagcaggatcacggcccctatcaccttgctcagttcccgaatcctgaggtgccgaagccggtggctgctcgggtcgcttcgtagtcagtgcggggtttgatctgcttcttgctgtaagtcttgatggtttgatatgaccaacctggagttgggtgctgacttgcgttaggttcctgcgggtcaggacggtttcttcgattttcggcgcttcttcttatgggcgaacctgcttgtttccaaggttcttttgtccaatgtatgtaattttatgactttcgagcgatctgaagccataacgtaatagcgaatatttttttttcccactttacacaatattcacggcgggttggaacgatgtagataaatgtctgtgttcgaaagctaagactggtataaacagtaagtcaatagtacatttgtagatactgaaatcattttcataaataatacattggtcgtgcacaagacacgagaccaatcactcggcattctctatgacctggtcctccaagacttggtcactgcgctcgggggatggctcgaccgcaggttggacatggaaataccccatttggaacaagacattctgccattctggccctgcggtggcttgcactttgtagtaaggcgtgtccgtagcgaaccacctctctttgcgcgttgaggctttgtcgcctccttcgagggctgcacgactagcacgtgtcgtgcgggaacgcttctcgccgcgcccgttctcctgcgccgtgagtgcaaacagtctctcgcggtattgctggaggcggccgtcgaagaccatgatgccacggatatacggagccaagtcttccgtgatcggtgcgagtccattttcgaatgagggggcgtggcgggcggttggtgtagggtttgaatagttggcacgcatgataggttcaaagatgcgttggaattgagggagggtcgatggaggggtctgcgggggcattgcagaaatgatggctttgttcaagagtcgggtcgcatatgaagatgccagatcctcggtatttggaggacggaatgttctacttatcaatgcatcgaaggtagtgccgacggcttcactgaatgatgaatactccgttcgcagctctgtgtgcaggagtgggtaatcgtcaacatagttggatttatagccttctggcggtggtggggcggatatatcaatagcatcctattcaatgattagctggcgtttctgtggacttatcgatcaaacttacattgctcgcgtccgtggaaatattggagcaaaggatgtcgagagagcttctcatatcatagtagtttgcttcccggaacaacatgtcaagttgcgttgtcttggaaagagactgaaattgaccaggggacagaatttcaacttcattcttcccagccatgtcttcagaatcttgcaggctcaggccccacgattgaagactgttgtgaatgatttccgtctcttcatccaacgaaccttgggccacaataatatcacgattgagccagcccatatatcgctcgtatgtgttgaggctcagaacccggagtcgatccccatcatgatccacgtttgagccaggtggccaaataggaagtagccaatccaaacccgctttctcgctaccaacacccatctggcaccagaagtttaaattcatcagtgacttccgaagatccaatccggatccttgataaagtctggtaacggcctctctctttaaaatatgcccctcgttggcggcaaccaacagcaagtaatcgacgctgaattcgggagcaggcttttggtatcgtagtatggcatgaagggacatatcctgggtagggactaaactctcattgttgcaggtgatgacgatgggccgtttagattggctaataagagtcaggacaccactccaaaattgacgatcttcttcaaaaagaatatcgacttcttcaagcaggatcaaagattgtttttgctcccgggggcgtttgggtgcagtttcaggcttagggctaggttcgccagaccgggagaccggcttgctggaatttgaggatgagcctttgaaaaagctcttcagcttgttttgcttggcgaaatctttgttgtctgttgaattttcggattcgttgaggagatgaacaagatgattttgcgtcatatctccgacgcgttctagcatatcccgggcacttcgtcggcttccagcatttatctcgaaaacttcgaaatcaagttcttttgcaacagcatagacagaagcggttttgccggagccagccggaccgctaagaagaatcgcattggacattggattctttctttctactccaggtaaaccaggtgctatgtcgcccgaccggacgactgtccttcgaggtgttgtggtcacgccgcccgctaactcatcatctgagccagagagacagtccatctcagagatctcatcttcgcttgatacaatgaaaccatcgagtttatcggttttttggcgcttcttcgcctttctttcccgcttcaatttcgcttttgtattctcctttgatgattttccggtatccactgctgtgattttgagatgccgtagccagtctcgaagcacctgtggttcacggccaagctgaaggacgtcttcagctgactcgggggcgtatttgtgtgtccaaagctgtggttcgtaggttgcacaatcaaaagccgaaactgatgtgagtagtcccgatcgaagtttggcaagagggggactagcagaatcccaaggaaatttgccgtttggcgaggaccacgacatttgtctttccattgccgtatgcaagacttgactgctggcaacatgtcgtatgggatgtcgaagaatagccagggcatcgtagtcctgtttagacaggcgggcgatcctgcttgcttcagccgttccagctagaaggacgttttcgtcatctctaattgagatagctgcaatcttcgatttttttcggtcctgggcagtatgccagatacggtcatcaacatctgaaggtgagtgagcgtctctaacgtgcacgagatcctgcggtggccaaaggggatcaagcagttcgggaaacttagaaacacgacggggaaagctagtaaaggagcttcccgaagctgcaactacccgcttcttatctggtgccccagctgtagtttggcttgagggcacgctcacgctgctatctggattgtccgattgagatccattcaagctctcgggcccggatttttgtgctgatttcttgctgaaaaacgggtgtgtgggctttcggggttggctttccttcttgcacggcttaacggatggtatagtggcagggggcttttgaacggttcgactatcttggatatcatcgatcaactttccgatgttcttttctgtggcaacactatactttatcgtcaccaccttgcgctcagcttttcgcggcttccttcgcttccctgtaattcccttttttttcgcctcttgatgaggactggaggtgggtgacgacagcagccctccctttgaattcaatttgagaatcttctgccttgcagaggttcttgcacctcggccctttggtttctcgttctcggatggtgtcaatgattgagtttcatcttcaacaagttgggtctccaccagcggaccgtcgggtggaggtgtagacacattgatttcggtctcgggaggattatcggttgataaaggcgtattgttggtcacattataaccgagccattctgccagacctgaattggaaatggtagtggatccggttgtttgaattttgttcgttcttcgtctctttctccggtgttcattcaggtcttcgtcaagatccgcagaactctcattgtttatgttggagacatttgaattgtagttccccgggacctgaagcccctcctcgtgcgtggagctttggctgcttatcggtcgaggatcgtgtacgtgggaattcacaggcaagattggctcattcgagggtgtagatttgaccgagacaccaaattctagacattgtaagctcagagtcacctgtagctataggacacatcctgaccttgtcggaagaagggatgtatgacttgctcttcgtcggttcccatagccatcggtagatttgatatgatgctcatgtgaacagtcagttgatccctgaggagaggccagggagcaagcggtatctcagaaatagcattgaaatgacagaattttggtggtaagtgtggtgcgattgcatgaagcaagaactaagtcaaggccgatctccatagcttcagacacgtccgacgcgaagggcgcgttaattgcttatgtcaggctgactgccgcacgtaccaacgctagccctgatatggcttaggggtggatataccggcccgacgtaatcccgaaaatttttcagatttccaaattggatgggtctgcatggaaaagatcacacgctttgagggacaggaacttaagtcattttaaattcctggtattccgttcgtcatggatttgcagtccccatctgtcctggcgcaattgcctcggccccttcacgcttctactggcaaaacccgcgtcggggatgtcttcagtctcgccgatgcgaaaaaacgcaaacgctatgaagtcgcagttgccgtagatggcgaggctgtgaacatttacaacgtatgcttgctcattatccaatgctccctcagttgcatctgacactaatctttatcaggttcaaacacctaagctcgtgacttcctacgccgtcccaccgcaatctactttctcttgccgcccatgttcagttcgcaggaagctgtcaaaaaaatcaacagtccgaagacagacttatactgctgtcacgaaacccgaacatcagatcaagtgctttgtggaggagatcggcagcagcggctcaagtgctccggtcatttcttcttcgactaccaccgtgaccgactcgaccagccccactacttttgtgggaattgtgccctctagtaccgatgccgaaggagagacggatccatttgatatattggctgtccacgaggatggtcgtgtgcgtagactgtcgtcggatttaaaaacccaacgatggagtattcagcacagtgagattgcaaaggtttgctctactcacaatgttcaatccagcttcttggttgaatttgatgatgcaaagaaggctttgttcaaaagacgacaggatttggcattgctggcgctgggcgatctgacaacctcaggaaccaacgagccgtctatcttgcttctggtatcccaaccgaagaataccgatcgagtctccctcaaagacatcattgtgcagatgttctcagtccccgcgcatgcgaagtcagagtcagggttggacgaaagtcagcgcctacgccatctacaaactttccacatcccggatgtgagtggcctagaagccaccaatggcaatgctatgcaatggagcttccattctggctcagcaggattgagcctttctttcgaaaagggtttcatcaacgttgacctctcccagtactctccctgtgtcacatcgcaattcgtccttgaagatgaggaattctcctcggtcatgcgcatttctccccaatctgtgattggagcccaaaaatctcttgtggcggtatatgatactcagtaccattctgtgcagcgcagcattccagccggtgatcttttgtcaagcactgggtcgaccccagaggctcccacaaacttcatcagctacttcgccaaacttgggattgctatcgcaaccaagggcaatacccttattgcttttgacttgagctctctccctagtgcgcccagctcttcgctgaagcggaccagagatagcctgctcatcgatgctatcgggagaggtattggttcttctggtgcacagtgggatatctcatcaaagaagcaccgatctgacaacatggcctctcttcggcttacatcaccggagcaagttgagaaatggacacagctcacaaaaacggtggagaaggcgaccaagacgaagaacattgacttgtttgataatgcggtcctgacctacttcagcacatcggatgcctcaacgacgctcccagtgcgcgggcagtatgttaaccccgaagcaactcttttcttgctgtccaaaatattcgctgtggaggagtctgccacagatgatacaatgtcggcctccccttcatctcaactccgtgttgccatgtggcccccgactacttgtgactggcttattcgcttgggacatctgtcactcgacaatgttgagattgcgctccgtcgtgcatgcaagccacgcattttgcagccattccccaccggctcgttcatccaggctctcctcgattcagatccctccttgaagcaggtcaaccaagtgcttgagggaccaactctgatttcctccgatgagttggcctacgcgctcaaagccttcttgaaccaggcacgctcgcactctggaactctcgaggaaacagctcgtgcgatcacaaacggtgatcttgccactcccacccaggaactttctagacagctaggggccgaaacggcaaccctaaaggatatattcgctggcctgaatacctcccttcaaaagattcactcgcagcccgtgtcggttgtcgttcattccctccgctccaatctctcgcggacagaacttatttctatggttcaccatctccgtctttccctcgctactggaggctacacttctcggttcactgaaaaccccccaacacctattactctcgaccaaattactcccactctttctctcgatgtcatcattgatctcatcactgcctctgtggatgccgtgggtccatccggttggatctcggccgtccccgcagcgggtgactttgaggactcagtcgctgccgctgctagccgtgaaatggaattgattgcggacatgaagtctgaagtctccgccgcgcttgcaggagtggaagaggcaacctatctcaagggtgtcttgtgcgagtacctccgcttcgcggatcaagttgacacccccgctactacctccgaggatgccctggccaagatggattccgaggccggtccatcgcacctggtccgctacgagaaactcaatggcgccgacttgcttgtcttcacccgtcccggcgagggagaggacggctacgatggcgatgctggtggcaaaatgctaccgctgtcactcaaagctgcttccaatgacgtgtcccgcactaagattaaaaaatccacgggcgaggtgaagcatcgcagcagtcgtgagattggttacttgcgccgcaaggcggttggcaagtactcattcgagagactgattatttaagagcatgtgcattccatattttttactgtaaaattcattcttgagggagacaatatcctaggagttagacagaacaatacatatgtgggttcccacgtatttcaattcttcatttttttttcttttttgggcaatcaaggacttctcgcccttgcgcgtgttaaaaatgtttcgacgatactattggagccagcacaatgaaattctcgagggtcaatgtatttggctgtttttggtagttggcgatctaccttgggagccttgcagctatatataagtgggaccgaggacgaaggattcatccagcactgagaaaagaagatcttttctaccgatccattgaataacattaagaacatcactaaatattacatagaatagaaaataggatcaactcaactaacgcttgtttaccttaaataaagaacaaaacagaactaagtgggactagtcaacctgttaagctacaaagggattcaatagtctagctcggatctgggggtttagagatattcttgtcccaggccagaagacaatagtggaactagggttaaatacagttgatagatctcaaaacgtctatactagtttatattattgctttctatagaatatcaatctgggcgggaggccaaaaaaggtaaacaagaaagataataaacaagggagagctctgagtggagataccctggacaccgcatctccgcactgttcaacccaccgttcaacccaccgttcttctcattccgagcaaagattagctctgatctatacgttttcatgtcgttggtgtcgatgtgaagttggtttggatccggaacgcgtaccggcatcaaaacaaagaaaaatgagtaaccaaccatggcttgacagtttgtcggacgactggccatctctagcgcccaacagtcctgtacctgttcctgccttaccggagtcgcctaaaaccagccagcagggaactcctagtcgcattcctatgcccgcgcggcgttcccaagaacaacaatcaccgggaagcaacaaaaaggacaaggttacccgaccatgtcatttccatagaagagaacctccgacgccgaagaccccccaaccattcaaaacacgcaaaccacgatcgcctgcccctggtagtttgaaatacagccctcccaagaccaccccagggccctacgccaaggaaaatctcaaggccagccccaagccgacgggtcgcagacagccctcaatggatgcgcgctcccctctacgatcggtttcaaacgcctccagagcctcctccacaacttccgaattcgacggtacggttcagatcaaatcgaagggcaaggacgcaaaagagggtaccccggaatggcgcagacgactagtgcgcggggaaatcgctgctggcgagcaacgcgacctgttcgcgccgataggtctcgaaaccgtgttcaagccgcccacaccccgtgctgaaacggaaacggcacaacaggcctctactccctttacgaaacaggacgacaatctgtgggatttcgccggtacatcttcgcgacaaaatagagacgaacataacagtcgcgaggatgatctcgaacgcgtcgccaatgaggatgtaagggaccatggcgaccagtcgccggaaggaacggtcaatcgcgctccttgggagaagaatgggggcctggacgtggattgggatcaggaagggctctcacaatcggggaatacacaactacggactgctagtgggttggaagatctgcgcaatgaaggaatcacacccataaccttctcccgcaataacactgttgatggcaatgggacttcggaagtcatcaagtccgcgctgaagcaggtcaccaacaagttggaaagcctgtctatcgaaaatgatagtcgcccggactccgctgcaagcgatagcttcctcttttacaaccacagtgaacctaatgcggacgggtctccacgagatgacagcttgctggacgcgacaagtcattctctaccccgggatctgtctatggggacgatggacttcagcagtcggcgaaaaaaccgctccttccctcggcgattctccccttcgccctttccttcccaccgtttgtcccccatcaccctcgccaactctaaaatccgcagttcacctctgttcaacccccctcacaagaccacgtcacctggtctaccgcatccttcctcgtctcatgtccggccggccacggctggagcagagaatgaggccaaaatgccgtcatcaggaagtccattgaagctgttcggtgaccatgacacattcactaataacagacttctccggcgcatgagccagtttgaagacaatttcagtgacacatcagaaggagatgagcccccttcgccctcggaggaagcgcgacgaaaaggcgagagccgcagctttttaaattcgagacacgagccattgcaggagatctcccctcggcgaaacgaacgtcttggatctcgcaatgctgtaaatcgaatcaaccaatttgggggtggcgagttggatacatttgatttctcagacactagcccctacgagcacaaattggtgtacgatgaggccggagggtttgggtcccgcccatcttcacgcaagcgatcgtcagcccggcaacaatatctccgtggcccctcacagcaaggattgtatcattacagcagatcagcgagctcaggattcactaggaaaccatctgcctggatgcgccaggatttctttgatgatgtgcgacacgggaatcggcccaataacaaggaaaatatggcccttgatgtcaagcgagtgccccgggcccccggcatggatcccacaccaaaacggcgccggacaatcatgagaaataatagctccgaacccaaacagaatgccggcggttcatctcagaagtatggcgacatgtcgctgttgcaacgaagtcttatgcaacacggtgtacagctcgacaatagtgactaccttgctccaccaggcccttctcactcaatgcagcgacctcgaacacctacaccaagccaaatacgaacagagggcgaaagccatatttcactgcacagagatttctccgaatccaatttcgacaataatgattattctgattctttttcccttgatggtgacgttccaatagtgaagattactgggaccagcgatacctcacgaaaaggatctatcaccactcaggattatttaaacgaagccactaagatcatggatctcatcagatccaaaggacgaggcgcagctggattgtcaagtctgcatgagtctgacgtggaaagtgaaggcgacgacttcagcgacgacgacgaatccacccgggaagcgttttctcgccctccgagccgcgacggaacggatcttcgcaagttgagagaggtgaaggaggtgaatccaatgatcctgagtcacctgaaaaaataccaggaacaagatgacccgaatgaccgagaaatgtccctgcatgctcgccatggccaggacgagggccaaaccgagatcggtgaatccaactcacagctcatccgattacatggaccgaggaaacgaaagactagtggcatgactgatgacacggcggaaaacatcgcccatgatctgatgactatcaacacacaaatgtccgggttcagcgccacctccgtacccacgggctcttcacaaggttcccacgtcaagggtatgctggcttctgatcttgtagcccacctgatcccgaatgaggttaatggcttcaagtatgaccgatcgaagaatcaatgggtgaaagatgaggcagaagaaccacatgcaccaatctccgaacccgcctcggaggctgatgatccattcaaagatattccggatctcactgtagacgagctccaggagatgttgagagtccagggtctcaattctcctacaaagaccgacgtcccaaccgagcgagagcaaaccaaggcccgcagtcctttggctgcgaacacatccccgaagaaacccgatgttcgaccacacaccagggatggagaaccttctcttggtgcaagctcggttcaatcaagattcactcgcttcacgtccagtgttcctaacacggggacaagagctacatcatggggcacagacgaagccgcagaaaggaaaatctccgagcaaggaaaacttgaagctcagcgcgacgagccattgtcctcgaagaatccccgatctctagggaaacaagcgcgtgtcgcaacagtgaatctctcatcgcccctttcgcgcccctcttctcggggtgagcctgataatggccagtccgacccgaccgcgaatcacacctaccacggaattgtgccagtcgaggattcagccccagcggaccacgaaaatggatcaacacggttatccgttcctcccacggggcgtcaaacttcagttggtggccagccgtttattcgacgtcctatctcgaggattgaggagagaaacgaggagaccgtcaatgaccaaagccttgtgcgcaggaatgactcacttggtgtccgaaagacaccagccagaaccgaggcagagcattctttgatacctctccaaagtgccgggcctgacacgagctacagcttccacctcagtccacttgcggactttaccgtccaccaagctgataaacccctgaaccttgaaatgagctatgtggctcatcgtacaaacccttcctctttgcgacaagtgcacgggactttcgcattggcaactgaagatttgatcaagcatattactgacgtggaaccatatgagccttattgggaacacgtgcgccgccttgtcttgcgcaataagggtttgattacgttgcacaagctgaacgaattctgtccccgcctggaagagttggatgttactgataacgacattggtcaattgagtggcatcccctcaaccctgagaaccctcaagatccctcgaaattgcctctccaaccttactccatggggtcacatgatcaatttgcagtatttggacgtttcaggaaatgatatcgagacgttggatggcttcgcaagtttgattcatctccgggaactgaaggccaatgacaatcagatccgcaacatagacgggattatttatcttaatggtttgctaagcctgaagctgagcaacaactctatcactactgtggatttcgaagggtccgagttgacacgccttcgtgatcttgacttgagccacaactgtctaacatctgtccggaatgtcgaatggcttccgtcacttgccactctcgatgttagtgccaatcagatcagcggctttgactcgtctgcttcccttattagtctccgcgccctgcgactctctgaaaatagattggaggctttagatgcacgagctttcccttccgtgagccttctctaccttgatcaaaaccacctttctaccgttattggccttgagaattgtcacaatctcgaggtactgtctctccgagagcagacagcgtccaaagaagcgtctaaagaaaagaaaattgaacacaggttagatattgacttgggacttgtcaaggatgttcgcaaagtctttttgtcttcgaacaagctttccgaccaaagtgtctgcccttctgctccgctactacgacttcaacttctcgatctagctgcatgcacattgaagagtctcccgggtgattttgctttaagcttcccgaaccttaaagtcctaaatctgaatttcaactcggttgatgatgtggagccactgattggaatgaactgccttgctagactgatgatcgttggcaatcgtctctcaaggatgagaagaatctgtcagattctcagtcgactaggaaaaaccggaaaaggaactgcatgttctttgcgcaagcttgatatccgtgggaacccgctaactgttggcttttaccccccagcggtgactgggagtggcaattcggatcgcaagaaattgaagtcgcaagaacaagcagtcgtccgacaccaagggacccaccgggacctttctgatgctctagctgatctggggaacgatgaccagagctctcaccgtgccaccgtgggcgatcagccgacagacagagaccccgaagtcgacgacccatacacacttccgttcgctgacccgcaagcggatgtgaagtacttaacgcacctcgatcagtccacacgtctacgccgaagagtgctagagctcttgctctacgccggcacgagtggctctctccacaccctcgacggactagaccttcggccctcgctgggcgacgagtcctccgacatgaacaaggcgtgggacagattggagaatcttggtgtattgcggaggaaagcgatcaaaaattaggctatattctttgttattcttctatcgagtttttttccccatcatgcgaaaagcgcgcgtgatttgagcattgctggcggcgtgcatggagttttgttgtttctcgagttggaattagccttttatgtttgtacagcatcagcgcatcaccggagttggatatcgaatcaattctggcattttagcatttcttattgttgcaagctgttcgggctttttgtcttattgtggtacgccataatagaatgagatagagccccatgcttgatctacgtcagaacttgtctcgctgtgtggtgaccttgtcttacggcctatacagaaataagcttacaattgccccgaatttggctatgcaagcccccaggtagtaagctcattctcagacagcaatcgatatctctcttcttctagtagcacagctccccgagtgatatgattttactagagcagtggggctctgtggggttcgggccgacccgatgaaaggattgcaaggacttcctggtggctaattaccaggaacagtccacttggcgggcgcgcgatattaaatactctggaggtattcaaaaatttgaagaagcctgggatgttggaataacaatgtgttagtaaggaccgaggtctcttgtattgcgaaaaaattaaggatgaaatttagtaaaaatagaaagaaaaatacatagaagtatataatccagcgtatgtagcttaataacagaagtcctgctatataggctgccaggtcaggtccggacaccacaatccgaggacgtcaaattatttcttgccctgaacaagaagttgcttctgcttcttgatatgcttgaccacttcgatatcgatcttcaagacgttggcaacagtatcagcaggagtcaacgccagccactgggccagggagatatcagcgacgcggtcgctcttgtagagctcgatccacacgagtttctcggtctcggaggtgttctcgatatagtgtccttttaaagagatttagcatattgactcggtattgggaaaatggagaagtatacttaccactgttgtcggggaaaacaccggtgtcacccgcgtggaagtcgaaggtgcgagccttggagtcaccaatgaacactgtagcacgggcttgaccctggtggaagtagagccattcctcagcctagatggtggttaatataggtttcttctcaggcacttgtgtgttgtgtaaaaacttacattaggatgccagtgaagctcacgaagacccttgggctccagttccacaatcgaagcagcaagagtctttgagatggggaagttggtggaatcaatcttgcggagtgttccgccgtgaccagggacaggctcagaggggtgcttgtaggtgtggtagacgtaggaattgtcacctctcaacgtaccctcgggagccttgtcaaggtctttgctgacagtgccgttgaggatgtaagggaactttgaagggaccgagtcgaaaaccttagggtcaacaccaaagttcttggcgagaatgtccctgggggtatgggcaatccagtcgtcaaccatgaaggtagtactttttaattagtatattgagttttcaaaagtgtgaatggagcatacccaatcttctcaaagtcaccatcatcaaaagcgaggaggtactcgttctcatcgtctagaccctgcacgttatgcgcgacacccttagggaaataccagatatcaccggtttcaagaacctcggtagtgaagccgccgttttcatcaacaccggacagcaggagcgagccgttgtagacaaatccccactcggcctgtgtcctaaagtaagtcaaatgtcgtagaaagtatatatgtgcggccactaaccgtgcggtgccagtgtagttcgcggatggcgcccttcttcagatgctgttgggcacctgcgatgtcatggctctgtggcagatcctgaatgacttgctctcgagaccagccgcctgggaaaagccgagtctgagactcagagaagctccacttgacgttgggcacaaagccattatcggtactggcagtgcggaactggtctgggttttgaaggtcgagcactttgttcgttccgcctatttagagaaagttgtaagcatgaatcactacggctagtacccgtgaagacctcttccagccttaagaggcttacctagaatcggcgctcctttggcaccgctaatcggctggtcattgccatcctgcctcttagtccgaggtactgcaaaggcagaggaaacaaatagtccaaagagggcgaggctttgggacttcattttgaatgaaggaaaagaatgtgcaaaagaatgggattggactgagatgcctcaagccaagcacgacggagtcatcccagttatatatgacaattcgacactaacccaacccctccaaataccgagggggcatagacctccaggaattcagctagtttcaatgtgccgctccctagttcctcggcgttgagatgttgatcctaatgaaattgaccagaacacgagttatcagaaagtataaacagtcacaagagatgatgcaatccaggaagatctactccgtattccgtatccatcttgcctctcacggaagaggttgcaaaagaagccatcctgaatcgataatagaccggaaggtacggagtagttctccgtaaaagaaaactaagcatggccaaggatataacaacattcttggcatcatgtcgaaatcgatgccgggtctcccgtgctaatcgtctctgtggggaaatagacgatgtcgatccagggacctgacaggtaacttgttggtcacgggacttgaaagtcgaccctggatcacctcatcggtaccttgaatgagtacatagatcccacatttcttggcaggcgcggatcattcctctactttgacctctctggttgctagtctcaaaaataacttgacatttgctttgacctctggaactcaataccgttccttgtttgagtgttgagtcgaatgtgagatttggtgatcgtcgagggcggttcctggaccttgcctattccggaaattatggattcccttaaccctagttcgacgacccgttcgtccacaacgcatcaatggcactgatagacagggcgaggctcagtcccggtatagatcggatttggttttgggtttgagctattgatttcaacttgcagtctctctcaactttggattaacttcaatcacgacatcttcttaagattaagaagaattgacttctcagaaaatatctgaatacggggaccacaggtccagcgtcagatcccgagtcggggattgttcggattctcatgtgggcgttgaggtatgaaattcgccatttcgcagatcagcgtcccctcgaggaatttggaagatcacacaaacccaaaatgagacttttttgcgtgctctatgctgatattgtcgagatggctcaggggaagagcaagatggtacctcaattggggcgagatgaaggcatacccgggtatataagctctcgaaatttcccgcaaatatgctcatcaaaccaacgcaatcccgctcattctctctctccaacaagatgaagtactctattgcttctattgcgtcgctgattgctcttggagagtgtctttctttgcctcctctcatacccactattcctggagtgaccgaggctttgacgaccaacgctcctcctttgccgattttgcaagtccctactcctccactggagagtcctcccttcacgcccagtgacatcaagccgaagaagattgggtatttctggactggctcaggcgacaagttccataaaggtatggatctacgcatggtggattgacgagaggagatgatgctaattatcattggtagacttccttgctacctatagtttggatgatgtaggccaatcctaagcctggtacggagtcatttgaacctaattgctgattcgactttaggacacctttggaacccttttatgggtcacagatgtgcccagcagtggcaatgacccccaccacctgggaccgtcgctggatggaaagaccatctggggtggtggattactatctctcttgaagactcaagtatgtagacttcttctcaattcgcctttcacagcatatctaatccttcattaggatactggtttctactttgacacctccaacccttaccgccccaagttcttgaagagtaaccgcggtatccttgcatccattgcggatgaggttcgggcaaagcccgatggtggatttttcatcacctacatgggctcggctgttggtacctcgcctggtcgtctcatcgagactgatgccgactttaacatcattcacgaatggcccgaggatgtggaaggtactctcaacattcttgaacagcagttctcccctcacggactcagcatcgattgggagaaaaagctcattctgacctcggacttcgttgaaccgattactatcttgaagccaagtctcggagtccgccgcgccgatacactgcgtctctgggatctggactctagaaagattctcagcaccctcacaatccctaatgtaagccagcccctgaactttaatccgcatgcatcttctaactcgatcagggtggtggtatccaagatgtcaagttcattcccggacacccggaatctgctgctatcgccactgccgtgcacctgggtcagctttggatcatctaccctctgcgaaaggacgccaatggcaaacagggtgtgatcgagcagctctacgatcttggtcccaaggcccgtgacaccattgccatctagtaagtagcttatctgctgtataccataagaaaatcattgctaacaacatcaccccacagctccgacatcagcaaagacggtaaatacttctacgccacccttaccacagccaaccacattgccgcgctagacattagcgacctcaacaacgtcaagcgtctggatgaccccgatgaggatcagcctaccgtcggacctcactatatcaaggtcacacctgaccagaagcacttggtcgtcaccgactacttcgtccagactggcgacattggtatcatcaacaccccggctgacttcaaggcgctctacatcgaccttaaagaggatggcagcctttctttcaaccgctctattgacttccccaaggagttcgccaatcgtggtggtgctaagcctcactctagtgtggtctttgatctcactgaccctgagaatcctatctactactgagttatcccagtggccaatagtaggatataggacactgtcgatgtgaaatggagatgtgaaatggagatgatgagggcgggatataattttttctcttctgaacttgacataggccttcgggcgatgtattttattgtggatatactacagctacttcttagttactactaatggacatccactgtactttttttggtgaagaaaatgaacctaatattacacagacactttactgggtattgaaggtaaatcaaaagtgtgaactagagtgtagtatcatggagggaaaaaagcaaatcaatataaagatatactcattagagccccatggctaaacttcatgcacatttgatgtagcaaccttcgggctttcatctctccgatgccgaccctcgatctgatctggagacactgacgtactaacccccttgcccacaacgatatcttcttccagcacagcgcggaattcctcgcgctttggcagaaggtaccgcacatccacaaatctcaaaatgctcgtcataataatcacaagaaccaacaaggccaaggcagactgccacccatatttatagaagggtgcctgactcgcaggccagacgaggacctgcgaccatgaggagatggcataatacccagcaacagcaacgccgaccacaagagaccgcgcttctggatcctgcgggatgagatcagaaagccaggcaaagatcaacggcgccgtgccgagacagatatacgagatgaagtatgatgcataaacagcagacaaacccaccgacagcgggtgtgtagtccaaatgctcatgataatacacgggactatcccgataaccgcttgaataacgatgagtgcccaacgagtttcaaagtaatcggataacagggcccaaatccacacgaacaccacattgatcgccgatcctccgatggggatagcgttgacttgcgagacggtccatctcgcgcttccgtctgggttctttagcgatttcaggaacagcccgaaataaacatatccgtatgttccaagaaccgtcgcgatatatagaatcgcgatgaagtagacgacccatcccgagaacgtgcgcttcacgccggcccaggtcatcttctttggctcggcgcggccgttgcgcgccaggcgttccagcgaaagctcgccgtggactttcttgaaccaaaacgcgcgcgggttgggtctgttcgggagatcggggagcatgacgaatcctgcaaatccccaaattaccgtgatgatggcgttgatcacgaatagccagcgccatcctgctaggccgctatgcccatcgagagtgtcggtgattgcggcttgcatggcgcccgagagcatttgcccgactgcttggcaggagtggtagaagcccattcgcttggcgagttcggttggggtataccagtgcactgtagggtggttaattcgggtcaagaaaaaggccttggaatgacatactgaataatgtcatcattcctggccaagcgctactttcgcatagaccgaggaagacacggatgatgtagacttgtttcgcactcgtcgtcattgcgaccaacccggtcagaacaccccatgcaatctccaagcctggcagccaataacttgggcgtacgtaggtgagaataacttgagagggaattagcattatgcagtaggcgacgttgaagtatgttgtgaatctagacagtatcagccatcaccaattctgaagtatggatgtttagggcaactcctcacagattaagctcatttccgagcaagttcaaatcctctttcatgccagacacgtaggcattgttgatattctgttgatcaagatatttgataactgacagaagtcagttttgccgatctcaagccgtggggggatttgtatgccaacgcaccctgtgaaagacaaccgaaagtcatcaggaacatatcaaggcgccggaccaaggccttttcctctggagagcggaaatcgacatttgtcgacgctttgcgacgaaacattttgaaggagaccatgattctggattgacagggatgagagaaaagccaggattcttgcgacggtggctattcatatacaagcccatgcagatccaagctgtgataagctccctgcaacccctcagagataggtcacataatgtggacaaagtagacatcggatcctagatccgacaaggattctgcgagatgcacgcgtgataagcattcgcaccaatggttgtattcctccattgacctcggaggaatgccggagtcgttgatatacaagataccaggcatgttggctattcaccccactttccacaaatgaatttggagataagttaaactcagaataatcctatcaatcagaagctctagagaggagagaaaaagctttcgggtggatgtccgtgataggagaaccacagcttccccgcatctctgcgccgacagcggtgaacccgagactctctctcacacagagctatatatattctcaaggatttacggaaatcttgactcattgcaaattggttgaaatgttggttccgaatatcgcgacaagcagaagcctgccaaatcccactccttgcttgagttactggcagcgaacaactcgagcatatccacatttgtatgcgaatatcgatgcaactgttccatcgaactcaaaatatgtcatcgtgggatctggtatttctggcggtttgacggccttcaaactgatcgaaggaggggccaaggccgaggatatcgtgattctcgaggcgcgagaggctgccagtggtgcgagttcacgaaatgctggacatgtgcgaccaggtctgtcaggcttcctttggggttattgcggccatttctgatttggaagatagatgcctttcggggtttcagtgcatattccaaagtgcatggagagcaacaagcgttgaagatcatccaggatgagcgactcgtcctagaaaaagtcgatgaatttgtcaaaaagcataatgtggaatgcgacttcaacttgacaaccacgtttgatgtctgcatgacccctgaatttgcggcttacgaggcagagagcctggaagcgttcaagaaagcaggcggtgatacctcgcacatcacgttctatgaaggggaagaggcacagaagaagaccagagtccccggagctgtagcggcctatgaatggccagcaggctcaagccacccggcaaagcttgcacagtttcttcttcaggcagtgatatccaagggtgcgaagctcttcacgttttgtcccgccactgaagttgaacggagcagtgacacagaaacctggaagatacacacacctcggggaattatagaagcagagaaaatcattcattgcacgaatgcccatgctgccttgttgctaccgcagttggagccttacattcggccaaaccgcgcgcaggctcactctatcgtgcctgttccagctttctctggggaaaaggctctacagagcactttctcgctccgctatagcctcctccacttctactccttgattcaacggaagggagatggcacaatggtgctaggcgtatcgcgatcaaacccaacaatgagcgctgagacaagggctggtcgattcagcactgatgattcccggtataatgaagaaattgccgaagaagctttgcggacttttagtcagatgtttcctgcttattcatcccaggctgccatgcacggtgagggcctggatcatgtttggactggaataattggcatgactacggactctgttccgttcgtcggggcagtcgattccctccctgggcagtatatttgtgctggattcaatggccatggtaagttttgcttttgctctactacgttttgaaagcggacgtgctgactggtaataggtatggcccggatatttacatgcgctccgactgtcgcccaacttgtacttggcaagacctgggatgaaacggggctgccagaatgtttccaatttagtgaggaaaggctcgcacggctttcaaatggagagttgccttcaatttggtagcgaagtgctcatacccgggggccggaggattgtctgattggctacaactagagcttcacgggcttggactctttcaaatatttagaatagacagggaaaaatagaaatcaagcctttgagctgatatgtaacaacatatcgcgatactctaacactgcaaaggttaggtgagtgaagagacaggggtgcagcttagtcaaattaaaacaaagtttcaggctgctctttcctaattcacactttccccttacctgagtatttcatcacatcttaaggaaagcagcctagaaccttcattaacttattggcattgagttggaacaaccctagaagctccttccaatccccaaagtggggcatcggaccgtcccgaaaggaagcttccgagcttcaattccttgaagccaaattgttcctcgaaacttcactatgattggccaacggtttacaagtcgcgtcacaaagcgcgcattcatttcgctccgtacgaaaccactcaacctccctcctacaggccctaccttcgccatacccagccacgaagtcgtcgatgaagaaagatgtccgaactatattccccaacactactatccagcaagaccgggcgagatacttggcaataactaccagttgctagcgaagatcggctggggcacgagttcgaccgtatggctagcacgagatatcacaaggtagttttggttctacgccaatcctgtccgaggctaattggagctgctggattaccagatatcgatggcagtccgagcgaacagttgctttgaagatcttgaatagctgcgatgctaaatctgctagtgaccttcttggtatcgaggagactgttgcacaaaagaacccttcacatctgggctattatattacacgcagctgcctggaaagctttgagcttaagacgtcggacaaaatgcacctttgccttgtatatgaggcaatgcgagagccaatgtcaatgttttaaagacgcttcaagaaccgcataattcctctcccgattgcgaaggcatatattcaattgcttcttgtcgggctacagtatttgcacgccgagtgcaaaatcgttcatactggcaagtgatattcgactcaagcaatgttatgtgaaaaaaaaaattgctaatcagcaaattcgctctagatctgaagctcgcgaatatcctgatgaccttcgagaataagaaagctatcccaaggttcattcaagaacaagtcaccaggctccccatgcactacaagactgatccaataaccaatcacaccacataccaaagctatcacggtttcggggcaatggacgttgaggacgtcgggaatgtacttccgagaataaccgatttcggctcagcatggcagttcgtcgttgacccggaaacgaagtcacaaaatgaagccgtgcttacgtatcctatacaaccgagctactaactaacaccgtgcgccggaggttgtccttggctatggatgggatttcagcacagatatatggaactttggtgtccttgtaagccgcgtgaatatcgatgcgcctattcagctgtcaagactaactcaatggttccaaaggtttggaacatcatcgaaggcacagagctgtttactcaggttgaagatactaacggtcgatatgatgccaaatcacatctggcagaaatgatcgctctgcttggtccaccacctaagggggtaattgagcgagcagaccatatgtcacaggtagacttccctacaccaattaggattgaggcgggaaagctgtccaagaatgcccgagaactctttggtggtccttacttcgatgaagaaggtaagtcttctactcgacgtatgagtgttttgactgattgttggcgctagggaaattccttcacgaggaactcataccaagtcgaaaaccggaggatacaattccatctcttgatgactcggaaagggaaattttcttgtcgtttgccagggacatgctcacgtggattccatcggagagaaaaactgctcgtgagctgatggagcatccattcctcaatttcggtggacatgtttctaaagatgccttggaagggcgctcttagaatgcgagctgttatatccattgatctcgggacactatgctgcttacagtttgtcttaccgtcagaagaaagctctccactatgtatgaaatctccactatctacggttattaaaaggactttcatgtatattgtcatggatatgcaaatcgaggttaaaattatggtacatgcttcgcttgtaaatgcagattactatcatgatatggttggaatgtccggttcagtatatatactcccgggcaacggtctcggtgaacgacctcaagaggaaatccccggagatctcgctctgccatgggctcaaataatatgaaaaaaccagcctctcctggcgggtatcaggatcatagggctatatcggggcaagccggtcacccttagtattatatccgagtccgagacaagcaatgctctctttctcagcagggttgtcgagtacgtgctcacagccgacgtacaaccccttattatatagaaacaaagaatcaagatcgaaggaatcacggcatatattcatagcgccgccaattctcctcaacccaccacttcgccacgtgtgccgcgtcgttaatccactgcacagcatcctctccatgctcaggcaagaccatgttcatcaaatccaagaggttgaaatcctgcagtgcttggagttcatgcgggtcgatctctacattcgagaacctccactcgacgtcaggaatgagtggtatgacgagacggtacggttttgcagcggaacgcagggcaagccatgttccgccggtgttcatgactgagaactgccagtcttgctttccgtctttttctgggattgtgggtcggatcattgattggccttcgtagagggggaggagatcttggatggcggattttgcttggttgtcgagggatccggattcggataggatatcgaggattgtggggaggatttgcattgaggttactcgggagtcgatctcgattggtggtagttgggggtgggcaaagactagagggacgtggaagctggagatgtgggggttgtcgtatggggtaacgccgctgttctcggggagtgagatgccgctgttgggattagattcaatcgatcggagaatgttggagtttggttggcacttactgatccccgaccatcacgaccagggtctcgttggcaacgcccgtttcctccaggatgtccaataactcggcgagccatttgtctgcaacaccaagcgtattgaggtagcgatttaccttatttttctttcccagccagccgtgactgatcaattcttcgtacttgtgatttggtgtgtcccaaggatgatgcgtaatgccagtcaagtgcgagatgaatagtcgttctttccgtttttcggccgatttgattgcgttgcggtaataatcccccagctctgtttcgggatatccccagaaattgtacttcactggttgaagaccaccctgcttggcgcgatcctcggaaatgttgatgtcggttaccttgtgcttgaagcccaacgcaggtgtgagaaggtcttggttgtcgtagtcgtcagtgatggactgcatccatgtggatcgccatggccaagtggtatagtcctccgttttggtccggttggcctgagcgttgagtgcttccaggatatgcggcaggcacggttggtagatgtggtacaggtattcgcgattgaagtccacgaccaagggagcgataccgcacacagtcgcgaggatactcttcaaggtaaaggtatcgcctgtataagcgttggtagcatggaatcctccgtaaggctgtacagtatcgtttccattgaacccggaagaagtagctgttagtctctctgcggtgggtgttagattggctagcctttcttccacctcagcagggatctggccattgtatgactcgcgaatcacgtccccaaaccaggattccttgcgaagtgggaagacgtctgcgcgagtgctttctagcttgagaagtaacacgtgtttgatattgacactgccgctttggagagccttgcggagaggctccagaacttcattttcaaggttggagatatgaatggggtcatgtcttggatcataatgcaggcgcgcagtgtgattggcattttcataccagtcactgaacccggccagtttatcccgtggcagccagtcaaatgtgggcggtgctgccagggctgtgtgatttcccaaccaactataatcacctgtcaattcaggtaaattaaccgatgacggagcgcgagactgattcttgtcgaacggtgtgacaatgacagtatcagatagaaagctataggcggcatttgaagggcgaatgcaacgcaaaataatcacaaggccagtgaatgcgagaacaaagacccgcagccaaggagatcgcggagattcccctgcatttgcttgggttgtttcatgagagcccgaggtcaactcaatagcaccccgaccctcatcccagtcctcgggtgcgactcgctcatagctcttcaagatcggagaagtttgtttcctgcgacaggcggacggcagaacactcttaaagattgacgcaattcccttggtccaattgtatagatgtggggttgagaaacaggatgcggcaacgaagacaacctccacgatgattaaacccgttaggccagtgagcagtgttttgacagcagccttgtcgccgtggaagttgtgcgcttgtttccagtggatctcggctcctgttgcgacgtagaaggagatattggcggctgatagaccggagattgtcaaactacccaagaaattcatttagcgatggtctcactcaaccctatgggaactcgtacctaagtgggaccaccaacaaggccgctatgacacgtgcccatcggcgctggtaatcagcacacaggatgtgagcgaatgatacacacactacatcttgtaagaagaatgtcgggccccagatcatcaattctccgggagataatgagttcagatgcgagtagatgtgaagaatcttggcacagatcacggcgatgaacaacagagagaaccaatacctgcgcgagactggccaacaatgatcgaaccaaaaggttggggagaaagctttgcgtagtatattgcgcgagccatctcgggtcatgaacctagagcccatgttaatttatatatgtagtttgtgccgatctcaggcatgacaatatagagaaaaggtcaccacggtggaagacaatgaacggtaaatacaaggaagagaaggggaaaagaataagaaggccaaatagaacccggcgaaaggggaaattttaacagacagctccgaaccaattccaaaaataaaaatccagtccaatccaacatcacaccgtccgagtctccgattttcccgcactttcaaggcgacagtattccgtagctcttcaggagtgcttcagggtccaccggtctcacgtgggtaggacataagctttggcacttgttccggaatgttcgcctgtttagtcatttctatttctaacactcggaaaccaatcgcatctcgtcaagcggagcttatggtgactagtccagggatacgagggtcaggccgtaacttagtgagctgcgattcccttgcgtgaggtctccttgcgttcagcccgatagttatggcccggacacataactgtgttagcatatgacattgccccagtgaccagtcactaatcgcctcgtagctcgtataaccagtttggttctgctgactcgcttacggattcctccgtatcccgcacaggaggctgagccactgtccaagattctaggctacagcccaaaatataagcaggtttgaaatttgggtgcgttggcagccacgggcttacagatgatctcattgtttttgtgcgagaaaagagctatgtaggcatagcataatggagactttaatcccaagcacatgatgatcatagtttagcttccgtgccgctctggggtacagaagcctgaactttgtagatctgtgcagtctcatgaacaggtgcttgtaataaacgatgttcctcctaggcaacactggcaagatgattcaagggttctcataggttatcacgaatctaattttcatccatctatcttcaggagttcaattctgaaacagcaaggaaaatttggacgccactcataaggagacctaaatagccgaggccccaccaatcataatcctcgggtttccaaatgagagggataatatctctcagcttgtctaatagttctagtagttagttatagggcttagttgactgatttagaaaatcaatagtcaagagtgaacacctcagagttaaagaagattgttagtaagctgactactcggatgttaactaacttgcgggcctaaaacaattagggctgcctattttcgaagatcaccatagaacacatacaataggcaaattccattgaccgttatgatcgagaaccccgtctcaacaacagtatcctatgtatctcatcattcttccctctggttctatagtccccatacatacacccttggtatgtctatcaatatattgaaacttgaaagtgcaatttttgtatagaatatagttgcaggtctagccagtctgtggccattcatttcgacatgtatacaaccccacccctcgagggccaacccgcataatgcacacttccgtcccataattcttggactctctcctggaaaacaaagttgaaaaaaaaatacaagacataatatgtactatatctaggatagttaggtattcgattttataaagcgcattcctaagagtaaatttgcgttgaattcctcactgtgtcctcttccatagtagggacgaagtacgaataaaacaaggctagagaatctcacatgtagccttccagggttggtccactcctgtcaacgtcaacccaatgatcgtcgacgggaacctccgcacgttgtagctaagactgcaccaaccctcattcaggctttaactgtggagcatgacggtgtatgtctctcccattacccaatcccaggtattgaagctgctacaaattgacgggacaaccggctgaagaccattgaatgatgtctgtacattagtacaaagtactaatgcgtatttcaacagcctaacctcttccctttaccccttttcatcatcccgagaggaccccggaccagacaccgaacaatgccgcaaccactagagatcgcagtggtaggttcatctatcagttattctcattgctattctaacaatttataggatcctgacgtctacctccgaccaaactatagcgatgattggcattcgtaaatactcgcatttcccccattcaatgtcatcgacgtctcacacgatatgacatagggagaccacgtctatcggttcctcaatctatcatggcctaatggaaaatggcagacggtatgtttcatcctacatttggcgcacctgggaggtcgacccgttactcatatacttattatctataggtatcaaactctgagcgacagagaatatctgtatgcatgttgcagcatcttccaccaaagaaattgccaacttatgtccgattctcaccagggttccgtccgatgacctagcattcgagtcctatgaagccgggtacgtacgaccaacctttcttacaccatgattatcactgacactctcagtcacttgctcgcgctcgtattagattcggagcgagagaacccgcttttcagagcgcctatcgagaaggaccccaaacatatcctggatatcggaacgggtaagggtaactgggctatgtacgtcaaaagagaaaaaccccctccctcgtcgacaagactcacaccaatataccgcttgtatagtgatgttgccgacatgttcccatctagtgagtgccaatccccgaagctcagcaagacagtgagctaaccccatctagcgactgtgcgaggagtagacctcttcccacccccaattacatggatgccgccgaactgcatcctagaagtcgacaacatcctagaagaatggacctggagagatcccctcgacctaatccacatgcggatcatgaccggctcattcgatcacgcgggatgggatcacgtctacgcaagctcctacaggtaaatgccaacacctaaatatccatatccgcaagcatatgcactaacaccaggactatcgcagaaatctacgaccaggaggctggatcgaacaactcgaaggcagtacatgcatcgactgcatcgacgacagcctgccggcagatagcatcctgcgaacctggggcccgaccatgaacgcgtgcggcgagcgcgccggactcgcgatggatgttctcgatgccatgagcgacagaatggaaaaggccgggtttgtggatttgcaggagaagtcgtacaagtggccgatcggcccgtgggctcgcgagcagaaatataaagaggccggcgttgttaatttccagcattggctttctggtatggaggggtggtgtatgtggctgcttacccatttcggtgcgccgcatccttggtcgaaggatgaggttacggtttttttggcgaaggttcgttcggaacttaagaatccgaaatatcatatttaccagagagcgtgagtttggtcctagccctgtggtgtggtattggggggattgatatgctgatttttgtttagacgacgtgtgtgggcgcgcaagccttttcctggagagcttacgcctgagacgactccgatcaaaagcgacgaagagtgaatgatgtggaatgacagttttcttagcgagtggatataatgataatgtataggaagggaactgaatcaagatctttgaagatgcttacaatggatatttccaatagtctcaaatttgtgatagacaccctaggagaaaacgctactatacagcaccgggtgagggtcaaggcggtttaagcctatgatgctgatcttaaaagctataatagtcgagggtgctccacaaatatatctacaaggcgaaaatcgcaagtgtagcaatgttaatcatgtttcattggacaatgtcgtaagctagctaattgcgacaaatggctcgtcattgcgcttttcataacataaaatcattgaaactattctagttccaaattcgccaactgcgatgaaaagttccgtcgaagccaatccatgtatgttttccacttagaaagatcgcctgatgcctccgggccggggaacgccttgctcagctctcgggtaatctttagaattccgagggatgcctcctgggccttctccaactcttgcttgacggcgttgtcctttggcttgaaggaaagcacagtagtgtaatgctccgacaaagcgtctaggtgccgctcagtatcctccggtgcgatcttaatcagtttggaggtcatgagattgctgattgcacggatgtcctgctcgtcatcgagaccagcgaggatgcggtcaaatagttcggccgtatgggtacgggagaaggaggtgtcgagcgaggcataaagggtttcgtaggcactctgtaaataatgatgttagtggaatctagggtaaatagtaagagacactgacctttcgcaaatcgagcccatcatccactttgtgtttgaatggacccatttgcacctcgcgaatgagctctggcttgattttggtgtcaccaagaacagccggaagaagctcatctaggtgagggagcagaagatccatcttgttatggattgcagagttgagagtggtcaacgcaagccggtggttgcccaaatcactgtcgctgagcatgttggtcaaaaggggcaccatcaacggtcgcagcacatcattgtaagcatcgctcgaatcggcaagcgtgtaacggaatgccgaaatcaccacgccacgaacagccgggtcggcattggctaggtactcctatgggcatgaggttagtattagaaacgtagcgcgatgggcacgacttacttggaagtgggggatgtaagcaacggggttaaggagtgccaagcgaccgacacattcagccccaacagcgcggttgtcttcctgttcggagacgacaaggagggcgtgccacaatttgtgagcggatggtgcaagatccggacgtacgacctctggatgctgaagtaattcgcgtaccgaatggagaagcaaatagctttgagcatttgatttctccaacccattcaaaatgattgggagataagctttgacgctacctgcggccgcgttgccaagagcagtcgcggcagccaagcgcacgtgatctgactgagattcaaaatgaggaatgaagagacttggagtcaacgggcactcggggcccattcgcaggccgatttcgcctaggatagcaagggcaaggcattttcggctaacatcccgtgcagtcttgagttctgttgagaaatcttccattgtgactccaagattcggtccaccgtggaccagaagggtgccaacagctcttccgaccactgacgagtcccctgtaattcccacgtcacggagaagattctgcatcaaactagcacctgcaccttcgtcgccaatgactttgaccagcagaagcaacgctttgagaacagttccgatgagtggtttggtcacaatcgagcagatagcagagatcaaaccgctggtcaccattagttttgcattgccagggacaagtttggcaataatgatcaacgtgggtgtaagtgtgtggaaatcagctgcagcgagaagaggcaaagcagcattctccagtgctgtgattgtctcaggggtgaggtgagatctgatgttagaattcatggaaagactgcggagagtttccaagcacgcgcctctcaaggcacgatcggatttgcgcaagttcgaccctagctcaagggcgacattgttgacccaatcactagaaacatcctgtttgcggctagcgagaacgacaacatcatcaatcgcacggacagcggacaaacgagttgtctcattcttcactcggtcgaccaaaacagccagaccattagatctcctctcagatgaaaggaactctgcaccccgatcgcctgaagtgcgtgcgaggatgacaccaaacacatgaattgctcgttgccggacttcgagatcagcgcttgtgtcggtgattcgagagtggacaacatcataaagcttctgcaactgcaaagtaacatcggaaggattggcagatacgcggggcggcgtcattgcttttataatttgctccacagcccccaaagcctcgctgctgactttgtagttgcggtcgttgacagctccgatcactccaggcaccagggcaatcaggaatggcaatagcgcgtcggagagatgggtctcggcaatcactgaaatgagacccagcgtttcgatttggagggtacctgcactgacggcagccccggtatgagccgctgtgctccctgagagggatgaggtcttgagggcatccgcaataaggtcttcaatttgttggagatggtctgcaagaccaccatagcgaaccaacgaaaggcttttgaggagaatcatcacagcttgtttgagaggaaccgaagcctgcttccaagctttgacaaggttctgcacaattaaaggcacagagcgagctagatcagcctgagaaccagacttgggggacgatggcacagcaggagaatccattgcggacgaggttccagcactcggctcgaagtcaatcattgacgcatcactgtcttggcgtctacgcttgcgagaattcttcgagccaccaacggcctccaggaagtcgttggatgtgacgatcatggatccctcgccagtcttccgaacaagcgccgtcaatgtcgacaccacctcaagcttcacactctcttctctctctttgctaatttgggagattagagctggggcaatctgctgaaacaaggccgaggagtcggaagcgcgaccaagcccgtaggccgagatgacggtgtaaagaagcttggcagcacaccggcgtaccttccagctcatgtcgtcgatatcactgtagccgccttcttcttcaaagtcctcgaattcgtcgtcgtcttccaggtcaggctcttctgtggcatcatcgtcctcactgccatcatcttgggtgcctcccatctcctcatcgtcctccacttcagcgacgtttggatcatattttaaaaatcgaagagctgatcgagtagtgttggttaggtacggttgcatctttttgttgcaggagctgatcaacgcctcgagcgtgaccaaggcagtctcgcggagctcgtccgcctgaggatcatgttcatcgtctgaataggatgacattgtcgcgatgatgaaatcacagaatatgtagtttttttgtgaaaataggaaagcgaaattgcgtgggctttgcgacacacgcgctggagaggtgtgtggtgttggggtcaccgtcatgagcctagagttgcaggcaagctagctgccccgcgctagtcccgatatggcaacaaactcacgtgcacgacctctactgcaaaaagtcaagcagatcaagtgatggttgggcacgttgtttggaagctagaagagcttgaagaccaccttgctttcttgctttagcccttttcttgctgctctggttgtcacctgccttgggatctgttgaggccggtgttgaaccttgcacgtcaaccctcataggagttgaccctcgcgtggtgactgtagctgctctagacgaaggttttgagatatgatttctcgaattcctttgaggtagtactgtccgctggcagcagcgtagacacttgtagactgtagcacctgtagatgccgatccagaggctaaaggcttgctttttttcggcttgatctcagtaactttactccactggggctttctaatgctaccacacgccccacagtgatctctcttctgctgggcatttaatgacttagattcctcgtggagaagccgggtgtgcaccgctagcagatgagccgatgtcgacgaaccgagggggatagccgagacagcctgaatgagaaaggaaggatcaatgtgagacattgtgtggccttgcctattgaggaataaagattcgtattgagaaatcaaacaattgtcagctcaatagcaaagacaatagaggcaaacgaagaacaatggagacaaacagaagacaatagcccgatgtttgctattcagagatttgccgcgcgggagcttaaaagccccaagctccacccgccgcttcttcccatctacatctctctgctctctaccctttccatctgctatccttcttttcttgcttttcatctttcgttttctttcctgcagtcttcatcggctttctagcaagggcttgcattcgatttttccttttccgacagcctcattccggggattttcttatttttcgcgctatcaaaatcccacagctcagtcagatcatccacgatgccacctgtgcgaattgccgtggaaggctgtgtaagtgatattgcatgactgcagatcccccatatcatgtgacatatccacttcgcagctggttgctaatcattctgtatagggtcatggtagcctcaatgacatttatgagactgttgatcgccaagccaccgagaaaggttgggactctgttgaccttgttatcattggtggggatttccaggtgagttccttgtcatgtccgattccacactagctcaacgttaactggtcaaaccaggctctgcgtaatgccaatgatgcgacttgtctctcggttccagacaagttcaagcaaatcggcgattttcatgagtactacagtggtggccgtgttgctccctatctgacattgttcatcggtggcaaccatgaggcgagcaatcacctcgccgagctctattacggcggttgggtggcccccaacatctacttcatgggtgcagccaacatcatccgctttggacctctccgaatctcggggatgtctggcatctggaagggttacgactaccggaagacccactacgaacgattgccatacaacagagatgacgtttcttccgtctaccatatccgggagctggatgtccgcaagttgctgcaagtgcgcacccagatcgacatcggtctctcccatgattggccaaagggggtcgaaaagcttggggaccatgcaacactgtttcgcaagaagtcaggcttcaaagccgattctgattcaggaaagctcggaagcatcgcggcacgcgaagctctcaatcatctgcgccctgcctattggctttcagctcatctgcatgtgcgttacactgcaaaggtgtcccatgatccacctcgcgcaaattccatttctttgagtccccccagtcctcatcttgctgtgtccgatacaaatgctgtggccgatacaaatgccgttgacgatacaaatcatgccactgtgatcccacggagtaatgtcaacaccaacacccttgctggccaccaattgcttggtactgccactggagacgaacagtctcgcatcaaagcctggaacgaattcggagttaacgctcgacgagctgagaaggagaagcgagaccaagacgattttatgcgtatgatcagagcgagaaagccgaaacctccccgaaacattacgtttgaagaaacggtcaagattgggcgcggtcccgttcagacgttcgtacgtggcgccgatggagaaaaaatcgaacccgccccagccgacgatgagagcatcgaaaacctcgacaaagttagccagggaaacagccctgtgaatatttcttccgaggaggccgttgccaagcagggatcttcgctgcttgctgagaccactgaagatgtccagacagccaagcatgtcaagacaatgcaggatgtcaagactactgacgtcgctgacaatattgataagatcagcatctctaccagtcccagcagcaccgcgagcgttaaatcttctccagctcagaaggctcttccaaaagccgatatctctctcaattggggtggtgatccctctcctgattcctggtggaatgatgatgagggtgatcgcgttcctgaagtggaagccgaactcccgagcagccttgcgcagtcgtttgtacccaaagctgccacaaataattcaacttccgaacgccttccacctcccgagatgatcaaaaatcttgagactcagttcctgaccttggataagccacacaatcatgatgcctttgtcgaactgttggagattgagccaatttccgaggaggatgatgccccagtggagtctcccctacgactcaagtacgacaaggagtggctggccattactcgtgcatttgccgatgagctcgagtttggtggacaccccaagggcaaggtccctgcccacaagggatttgaatactaccaacagcgtatcgccgaggaggagaaatgggtacaggagaacgttgtcaacgctgggttgttgaacgttcccactgacttcgtcctgactgcccccgtctatgaccccaatgtttcgatcaatacccaagagcagccgaaggagtacaccaacccacagacctctgccttctgcaatctgattgggatcgaaaacaagtttgacatggccgaggaagagcgtcaggctcgcatggcggccggcccacgccccgaagaacctcgtcagtacactggtcgtggtggacgaggtggtcgtggcggccgtggcggtcgtggtcgtggtcgcggcggccgtggttctggacgcggtggttatggtggtcgtggtgggcgtggcagcactgatgcctggtaatttgatcggtgctttcgcgtttctgttggcggcttgacgatttcgaacgggggaagtaggaatttttgaagttagaatatctttaccaatttcttttgttttactctccccatgtatgtatgtctacgaaattatgaaaccatacagtgatcacctagtttcgacttggatttctgcatatttgtgacacgccagaatttctcggttagcctgtgctctactggcatgtgctatgtatcctagggcaaagtttcccgccactctctccatccgttcagtgttaagccataaatctgtcttcttttcacttggaagtgtctagatgtatatttatcaaatgcatatatgcttttcgttgcatttgacctttcccaagagtcttcgttcttcgtgtttccgcctccgctgtgttaaaatctttttttgttcgaggcttttattcaaagatgaagatagatgaagaagctgatcaagtccgccaacaacctaatactctcattgaaatggtaatcaacaaccacttcagcttccaccaattggttgtgaccttgtaagattaaaaaaaaaagatgtgcatcatccgtgaatcgaacacgggcctcgtcgatggcaacgacgaattctaccactagaccaatgatgctgaggcaccagacgattctgagagctgattcgttgatgatatctggtggtccctgttatcgtctttgaggcatctctgaagttctagatctttgaaatccaactggtcatttttccaaagatacctactattatttgatatttgatggattggaataatgatttgcgagaaatggtaattattcgtcacatggtatcggagcagttggcttcattcaatctcctcgatgcgtggatgtccggtgctttcccattccatgggatcaacctgtagaccggcgatcctgtcacccagcccaaattgtggattgaagccatcttgaccatcctggatctgagcgccaatgccccacatcaaggacttctccgaccaagcttccaagctttcaatcaaggcgcgcagatttccacgagcgagcccgtcctcctcacgaccctcgacgaagcggagagttcgtagcatggcagggatgttaccaatggttgactgtccctgcatacttgaaccacgtggagccgaaaaactggaagccgagtcgtcaaaaagagaaaagccaaacccgatgtcccggtttccgcgtctctcccgcgctgcctcgagagctttgagaatgtcgaagagtagaatgatactcgcccggcgcaggatagcactctctggttcagtctcgagagttagggtagcaagcgcgagttcgacggcggaagaaagaatgactgggccaagaccgaggatattgacgttgatggctgatccaagaatggaaatggccgatgcccggatgcgaaggtcatcaggagcatcatctgcggatgcaccggcagcccatgcagcaaccacgtttgtagcgtacgccgattgctctggggattcgtcgtctaaatgaagttctgagaggtcaagctcggaagcagcgttggctactcctgatgaaatggaccagccttccggcatagctggctcttttgccttgcgctgtgcgcgttcttgttcctgtctctctttggcgagtttttccttgcggatttgctgtgcatgttgcttgttgccacgccgtcctgcaacggcaatgataccctctccaagaattttggccgtatcaccgaccagtgcgtctcctaattcctggactgttcgcagcagacactcaccaatcctgagtctttcgtccaaggctcgttgctcgcgtctatctgcgtactcttcaaccaaggttttgatcacggtacgtgggtgacgtgatgctagtgtaccaactatcttaattgcaccgaggtatgcgtattcctcgttggcagcggttttagatgtgtcggtgatgagggagagaaggagtgtgagggtcgagcccacatcaataacaggtgatgagttcatgatcagtttcgaaatcagcgataggccctccgcctgcacgggtggtaggtctgagttgagattggcaagcgcctgacgatgcgtgtcaaggtcctgaacatgagctggtactgccttgattgtggtttcatcggtagcggctaggtgaatctccaacaacatagacgaggtcgttgctgctttggagagggtagtgggcagaaacggaataagttgatcgaggtcctttttcaaagctccaaggaggggttggatttcggcagtgggagagaactcggcggatgcaagaagtgtggacatcaaactaaaggctgtcgaaacggactcaaaggagtcgttgcttaactcatccctgtcgttgtccttggtttccacaatattagccagagatgacagggataccttgctatttacgcctcgcatcgccgtttcttgggcgctaaatctatgtaggtccccatcaataacctgcttgatgagctctaaaactcggagcgggcgtcgagtgagtgcttctttgaagttctcaagcagcttctctgcaaccttggcactgacaagcctctgtatgatgttgtcactctcatcaacgggacctccgttcagtgtcttgcgagggggtgcggaaccttggggatgcaccagccagttttgactgacatagaggaatatatcccccgtccgttcctcactgctaggatccgagccgatgagactgacgaaaatatctgctcgtccttggagggaatcgatcaatcgcaccagatttgaatgctcattcgttttctcactccgcttcttcaatgcgaccccagcgtcggaatctttcacgtatgtccacgtcgagcctccatcccaaagcagattatcaaccagctttttgaggggttgggcaccaacagagataccaaaatatgtttgtagcagaggcaataccctttcatggaatgaggtcagctcttcctcctgagagaaacaaactaagccccatagtggaagaataatcggatagacgattcgtttcacgagaccggggtttggatgctgcaatgtcagacacctcagtctgcttatagccaggtccactgtggcgccatccaccaagacattggatgcgggatttggtgccacggaagttggaaaagagccttcaacatcggtaaaacgggtgatccatcgccttgatttagcgtcaagattcgcggtaagtgcattgaatataggctctataaagatggagtggccgacagtaccaggagcgccataagcccgtttccccaaaattccattaccgacaacgtaggatgcagtttgcctcagatccggatcatcgccgtctatcaatgctagcagttggggagcaattgtctcaaaatagacagttgggtcaacaccagatggcacagaagaaaggagtcgtgagatttgcatgatcgcctgcacagtcaaacgagggccatgtgactggtcctgtgcttcctggcctagcgatggggaaaactgcgatgcaatgaacatgatggtttgcactactccaccgggtcgtagcggaacttgcgcgatctggctggagatagtggacttgaaccatggtgcagtatctgactggaggaacgcggacagcgtaggtagcaacacagtggttggggtactgtaggctgttagtattacttagaaatagtaaaagcaaggggaacgtactcatcaattattttggccaacgttttctgatacttggtccggtcgaatgatgctgtggtatttggattgaaagccagatcggccgtgccactgattatatcactcaatatacgaccacgaatgatcggctggaggcttggtcttgggtcgaaaagaacgtcaaccaaaacgtcgattatgcggcgcaaaagaggctcatcgtgcggtacactactagcagatgcttgagcctgcttcgcaatgacaccagctggtaataccgatatcacacgctgctgcagggggatcccaacgccagatgatagcgaaggatatattccttccagagaaaccaggtccagtaatgcatgtagcatccgacgacgcttggcatcttctgctggtgagtcttcaacctccccgcatgatttgagtgacccaaattggtcctcaggtgatacaaatgatttatggatactggtcaaaatatccaaagccctattgatcaccgctggtctcgcggcatcatcaccctccgaatcccgactgaggatctgcaacaaggatttgccttgggtcttctttatttcctcttgaagatatagttagcgctcgacctagatgtagcttgacatctcaaaggtccatacctcgatcgagaactggggtcagaaagttcttagcaatgccaaacgcgtcgcgaagttgctgttcatctcccatcataaataattgtaggatactatcatgctgaattcacgccaatgaaggtattttcctcatcgacattgtccggttccaaggttcgaaaagtaaatgaaatcaccacgaacaattgcggtcttggcgtttgtggctgattatgtcatagcagataaacccgtgactgtggtaatcacgtgatagtcgcgtcagtggcccgcgcttgcccgcattggtattgtcgcgtcaactgagatacgttgttgttgtcaccaactccgtctacttctatccactgctcatttcacaatttcaattgacaatgttagaccgatgtggacagttctccagctaccccggatcttgcttgttcccacgacattcattggaccccattctcgttcaaacctgccacagttccaccgcgaccgtttcctgagtgtggagccactcgagtctcttgccttacaaggcacacatatacagatcaaccctctcagatcttcattttcctctgctgccttaaatggtgaaccgtcacgtatatctcgccttcggtgactcatattgtttcggtgcaaaagatattgaagtcaaccccaagcctctctcggttcaatgtccacagcgacacagtttcacggattgcgcatgccggataatacgattagccgaaacagactgtgatggtccgattaagcgaaagatattcgaatcagccagagccttagggcacaaaagacggtttactatgcgttatccaaatggagagcgcgtcggtttaccaatgctggacgctgcatgccggtcacaaacggatggtcgccctatgcctcggatgtcagttcaacgagaagagaacgtgggtgaagcatgtcgggtacttcggtatcagatgttaccttgaggagcaaccacgacagcgcgaccagatggcgattgaatacgacattcaagtctcgaatatcctagggcgtcaaattgtttggctcagatatttgttgcctagaacacagcagtatccttacacacagtcatagtgtcagcatatccaaagaatccactcgccggaatcaacattcctctccctgaaaattgcccaggcattttcacagttgaagttgtcgcgaggtcctttggttatgctgccctatgattcttcaatgttggccctaggagcacatagaagattgcgaactgttgtctcgttccagatggcaataaatttccccaaacaatttggtgtttttcggacttgtttgtctgtactctatcgtcaattctgcgatcatcagctgtctgctcctgcacatgtttcctattccaggatccctgggggtcttgcccctgcgttccaccttcttgggttctgttactcctacgccccacaggcggctaggcacctcgtatcacggcacccgccactgattcgacttcgtcagaagatctcgaccgaccgtgttagccatctcttcgcaaagtagtttgtggatagatcgatgggcgccgatctcaacaatgacttccaccattgttccttccctagggaagaaggaagcgatttttctggatgttctttgtccgcttcacaatatgccctcccgcgacaccctcgcgtctaccgggagaggaaacaaaaacctgtcccagagggtactgtaccacacacgggagactcggcttcatgctcttgcgacggtatcggtgaaacaatggcgatttgactaaacgtgcggagatgggtggccgtcaagcagatttggttgagtttactgtgtctcatccaagtttggcttgtctttgtgaaatttgtgtgagctctggtgagtttgagggatatgttcatcggtgtcgtctgctcccagacattcctcagctcccatttgcgccaatctttgatgctcgccttgatatctctcgattgatgacaatttttctggtcggagcaacgtacggtttctatcgttcgaacgctttaactcatcagcccatttacagtcggcatgggggatgtccttggtcggggttctaacctgtatgcgtcatgcagtaggtgtcgtgggacctctctcgagtgaggatcaaagctttggcttgtctacgatgcttatctgctgccatgcgtcccgactaaggctcgtctctaatgtctggttgtaatgaactgaaaagcgacgaattggaaatcgggggatctctataccgcgaatgaactattgtttggtcattgggacttgggcgttgtgtcaatgatggttttttctttccatgggagcagaatgtttggccaggcgatagccggtggactgccgtttctactatcctttggtggtagaagcggccactttttttttataagtacccccaaatcctctaattccaaggtgatgctaactacttatatttgcagattctggtgcttggtggatatgacaggaaattaaacaataagaatgttagctaacacaatggacaatgcacgttgtacacctgcccatggatccatgtagatatcaatgacgtcactacatcatgccatcctcaccgcccttcaaatagaaggcggtgacatatgtcatggcagaaatgtaatacatcatcccactctttgtcagccccacctgccccgcgcagaataggaaggaatgttcccgtggctccgatatttttttggcgataagaatttcttgcttggatccaacttgctttactataacttccctcgcatttccctctttacacagatattttctatcccactacacattatttctcatttctctttacacaaatcatatacaatggtcaccgtctccaaagccgacaatgatgcccttgaggcacagttcgagtcgcaattccaaaagcccggcgatcttgtggagcgtgatgatgacaccggtgcgatgtcaattgaatcactctgcatgaactgccacgagcaagggttcgtttctgatattcgattatgttttgcacattgctaaccttccactttaattagagtcacgcgcttgctcttgcttcgagtcccttacttcagagacattatcctggagagtttcgaatgtgaacattgccactttaaaaacaactcgatcaaatccgccggccagattcaggagcgtggaacagtctacactttgagggtcgagaatgaggaggatcttcaggtatctatctccagctataattcgttttctcctgctcaagctaattggatatttagcgccaagtcatccggagtgatgtttcaggattcaaacttaccactaaggaaggcaaagagattgaagttcccaagggaacaggccagctgaccaatgtggaaggcagtatgtgaagcccaatgcaatatagttcgatcccaagacgctaaccgtatctagtggttcaactcattcatgaaaatttgtcaggagagcaagatctccgtaaggagcaagctcctgaactttacaatgcccttgtgcctgttatcgccagtcttgagaagatcatgaaacgcgaggacgctttccccttcaccatcacgctagatgacctcactggaaattcgtggattgcacctaacgccaatgatcgtggcaacaagtacaagcgccatgaatacccgcgtacccacgaacagaacgaggagttgggaatctccgctgacgaaaacgctgtcaacaaagaagacacagctgaagtgggcgccggcgacccagatgatctcgatatcgttgatggccaggtctacagcatccctgccgagtgccccggctgtaataagcaagccgaggtgaacattaagaaagtcaacattccttacttcaaggaagtcctgctgttcggcacgaactgtgatcactgcggctacaaatcttccgcaattaagaccggtggcgaggtacccgagaagggcagacgtatcactctcgaagtgaagaacgaggttgatctctcgcgcgacattctcaagagtgacagcgcaggactttacagtcccgaactcgacctagacgttcagccaggaacgctcggtggacgtttcaccaccgttgaaggattactaggttcgttccccttatttgattatattgacccagctaaccctttatatagttgagatccgggatcagttaaagggtgccattttcgatgttgacgattccgcacactccggaggtgacagcatggtctcttccgataaggataaatggcaaagattcttcagtcgtctcgaccaggctatcaacggcgagctcaaattcactattactttgcaagacccgatggcctcgtcttacgtccaagacctttgcagtccagctgccgaccctcagatcaccattgaggactacacccgctctgccgaagaggaagatgatctaggtctgacacacatgaagaccgagggttatgaggaggctgaggccgaagccgccaaggctaaggccgatgccgccaaggccgatgccaccacgaccgatgctactcagaaagagtagtcgaaggattacgatgtaatatccatttcatgaaactcgcgatgatctgattcttttgggattcttgcataacggcgtctgtgatatgtacttttttgctggggtaattagatatttggtcatacatagggatgaagtcataaaagttattttactgtctacttacttcatcatgcatttcttcccagtaaaactgttaataggagaggcctaccgagagagggggtcactttgaagtgtggattgaattgttgaagctaaactagagctgacatggtagaatctctctgtatctactgatcatatctaattttgcaattcattctctaaacggtgtacaatgcactaacacgaaacacatttctcgaatcttctcgcaagcaccaggcacttcatatccacgaagcgattccaaagttcagatgccaccaccataacagcacctaaaacgatcatggttcccatccaagtcatagcaaacgatagagcatgcttgctcgcctcgatagtaccaggataaggcgttcttgtaactgcccaccacaaaaagtctcgcaccggccatttaagagcgagatagactgtcgggtggactagatagagcggaaatgagatcttgcccaagtattgcagtggccgggagttaagtggcctttgaagcagcgcagatttgctaattgcatatatcaccagaacagctcccacgctcctccagcaccggggcatcatctcagcattatcccactcgggagatcgagccacggccagccatcggtattcagctgctaaccggtcagcaccgcacatgcaaaggaaatacatccctagaatgaaagagactgatattccaatccgttggagatagattttctctgtcaatttgttccaggctttggtaatgggctcttgaatctcgagaggtgaagatgaatacgataatgcaatctctctgtctggtccggactctgacgcgacgtgtctctccgcaagaagaatcccagcaacgaaagcgaagaggtcccaatgtcccatataaaaccaatacatcgccacgcctaccaacgccagataccgaggctggggcttccaaaacgagaacgtcaagatcaacaagtagacagcacacgagccacgaaactcaattggcatcgtccacagctggtagtttatagtcctcatatccggtcgattgcgatcaaaattgatatcgacttgatggttgctgatatccagcagatgcactattctcgaaagcacatattggacgtgagcccaaggcgccgtcaagggctttagcccgcctagccagtcatccgcagctttccacgggaacacattgcagaagtacacaagttggcttagaaatagtatggcgatagacggcagataaattcgaaagattcggcgagttgcagcagagcataatcgacgaaagaatccgacattactcgccccaacgtcctcgcgacatcgcagaagcggaagagagatcgcgtagcccgatataaccatgaacagggctaccattgacgggccattgaagagaagtcggaagggcggaagttggattagacgatggttttcttcggccggttcgtcccagtaggaccttgtcaaaaagccgacgatactcttaggctccgagctctttgaatggtgtattactaccagagctgaggctatgccccggaggctatcaagccaaagaatgcgccccatgctaggaaagtaatttgtacagaaaggagagaaagtcaacgagggctgatgctttgttgaatagtataataacttcggtaacttgtatagaattagattacagaaaggtacttttgtctggaacttgacctataaacttagtcttcaagctagtaacactagtaaaaaaaaaactcgagatcgatacagctgatcgcgtctgtaatacaggtggcaatgaaaccctgcaagacgacgatgcacgatataaatagggttcatcctcgtccctaagaggttatatatacggggtacatgcaggagccatcacaatatgataggtaaactgtgagatcccaaaaacaaaaagcaattggtcgatgaccccaaaaatgatattatcgtgtgaccccctgcagatccctagacttacgcctaactatgaattcattggtcgcattggacacaagtattccgtccgattttcaattttcaattttctacaaagtagatcgtgatcgttactcggatctgttcggctttagaatcactgggcgaatttcacgttcagatggttccaattcgttaaatattaggattaagccaactttttcctagcagtacccaatataactttttccttgaacaagaaatctgcagagttgactttctccacaagtaaggcagctctatatgcatagtgcccaaatctatatcttgcctgacaaggcattcaagcccacagattcggtctgtgcacgaatctgcttctgccacatagctttatatcgaccattagcagccagaagttgctcatgggtcccagtctctgcaacccgaccttcgtgcaatacaacaatgttatcagcagtggtgatggtgctcagccgatgggcaattactagcactgtgcgcccacgtgacaggatggctagtgcttcttgaatgttctgctccgtctcggaatctaatgcggccgttgcctcatcaagcaggatgatctgaggtttcttgataatggttcgggcaatggcgacgcgctgtttctcaccaccacttagtcgtaatccacgatctcccactttggtttcgtaaccgtcggggaacgccatgatcttgtcgtgtacactggctgcacggcaggcctcgtagacttcctcgtcagtggcgttttggttggcatatttgaggttgtacatgattgtttcgttgaagagaacggtgtcttgtgggacgacgccaatgtgtctgcgtaccgaatcaattgtcaaggtctgcgtatcgtatccgtcaataagaagatttccgctgctcggattgtagaatctatagagcaagcggaagattgtcgatttcccgccacctgattctcctaccagagctgtagttgtacccggtttacagtcaaaggtcaatccgttgagagcaggtcgtcgggtgtcatacgagaatttgatctcgttaaatgtgattcggccgtgacagactgctagcggtgttgcagacggtgcatccactaccgatggctggacgcggaaaagctcgagtagacgctctgcgttgatcaacgctgattgaatgtaccggtagaaggttccgaagatgttcaatggggcttgcagttgggccatgtaggtaaggagcgtcacgaactggccgactggacgttgaccacgagcaacttggtaggcacaaataaaacaggtgatgagaaggccaaacatgaaaatgacattctggcaaatattcatcagattctgtgcgaatagggaatgccattccgcacggaggtagtctgagaccgctcctcgatagcgattgaactcgtattcctctgcgttgaagtatttgacagtttcgtaggacacaagggaatcattcctgtgtaggttagtaaagcgtaatgagataaacagagacgtaatacaaacttacttgacagcgtcttcctgtctggaagcgttcaccatttgacgtcgcatattggccctccaagaggcaatcttgatggttgaatagaggtagaagaatgtcatgacagcaacagccaacgcgtagtacacgtcaaatacgattagaaaataaccaatggcgatggtcaaatcaatgaacatcggcaacacttgaaatgtcacttgctcaagaaaagtgttgattgagttgcctttggtgagggcagagagaacctcgcccatctttttacccaggtgaaagtccagtcctaggttatgaacatgctcaaatgaagcggttgacaactccatgtatgcatactggctcactgagatccacagattcgagcgaaccgactcaaggaaaccttgactaccttgaagccaacggtagatgatatacagacagatgggcatccaaggcactttcagatttccatcgctggtggacaatgagtctgcgatcactcccacttgatatgggactaggatatttaccgctcgctgcacaatcaatatagcaaagcacatgacgacgacaatttgcaaccggagagacttgtaaggccacagatatggaaagaatagggaatagccactcagatattccatccagttggtggaaggggtcgtcaaaggccgcacccatgcttctacttccggggtctgttgaccatcggtcaaggcatcaccatcatccgagttggcattgcctcttgaatctagcaggctagtcgtctctccggcatcggcatcctcagcctccttgaatgcgcaatgtttgcgggcagatttgaaaatgtaggacgcgaccagcagtgtgagaacaaaaatccgcactgaacctgcggaaatctccaatgcctcccaaaatgtgatctttgtacgcaatcttccaccgaatggatcttcgattgtaggttcatggtggatgtgggaatagattgagattgaagttgagagaatggctatctcgaagggaatggccgagagccatgggacgaattgcgcgattgacggtccacggttctcgagtaaagagatgaagataacggtatgagtgaagaaagccccgacgacaaagaactaggtttaattagctttgctttcaattttggaaacaggtatcgcaccactaccgcttgaccacaccaccactgctctgactttgaaactatggcatgggtcatatgaattgctgcctcagcaatataggttgccagcacaaacagatccagccaaacaaaccagcccttggatctattccgcgcaagctccgcgggcaagtccctggccaccgccatcatcattcgggttcgcctaggcagtggtttcccattggggccatactggactttaatgttgcgatcagcatttctggctacctgagaggaatggaccaaaaagacgataaagataaaccctagcaaaatcggagggtatccaaagcgaagatattgaagcaattcttgggcaacgatagccgaatccatggctgcaggcttataatcaaagactctctcaaagtggctttgaccgggcaagacgggaagagtgggaattgcccgggaaagtatgtgattgtcttcacatgcgaggagttggctgcgagatcgcaagctgaaagttcacaattgagctgtcgtgcgctcacattttagttgcgacggtgctgtcaatcagtggagctcggagggacactagtaacgccactgtattggctagtaatctttgcttccaagattgtgttacccatcgatgcatgtctgacctgaagatcggggtcagtgacttgtgtatactccagacagacgctattatctagtatatagacaagtatagagtacagggtatgtacttgacctcgtaccgaatatgtatgtactggatttccgcccttctggaccttctccttcctttttggtcgttgtctcttaccgctcttttatcaagggctgagcaggatgcttacataattcacatacttcgccgttcaaggttcgctcaccgacaccagcatcacctgactatcacctgaccacttgcctatttaagtgccctgattcgcccattgagcaggagctgagcggctgggtgctgcgtacgtcaatctccctgggacgatccgggtaggccgctgaaggtcaagttaaggtggctggacctcatactcagcctcccatcgccgataccatgagagctttggtggccatccagctaggtttgctccctatgttgcccgttggaatgcagactgtatatatgcattgcatagggatattgaaattgttcatttaatttctcggctaatatatctcatcattacttgttcatggtaaactatacagtaatatatccaccatcaactaccatagcatgaccctgtacaaaagaggcctgcgtggagcataagaaaaggattgcatcggcgacctctgctggctgacccattctcttcataggggctatctccgctgctggagtgatggccgcgcgaatctcgggattctccatgatgagtggtgtttcaatgacacctggacaaacacagttgactcgaatcccatccttggaataatcgataccatctgcccgagtcattccaatgaccgcggattttgatgcacaatacgcagctagaacactgtcaatcgtgggtttaaatggacagcagcgcagaacttacgagcacctggacggctaacgattcccaactgactagcaacgttcacaactgcgccccgctggccaggacggttagggtcgtgacttgggagttcactttgagacaccatctgtctaagctctgctcgagaagacagccagcagcctcggtagttgatattgttgacccggtcaaattcttcgaggctcgtttccgctgagcgcaatgacttcccaaggacacctgcacagttgacagcatagtcgactcgtccgaattgttgtacgactgcgtcaataaacgagtctgcgaactggtcatctgccacattcccagctttcactaggagttgagtcttggggtaggtagaagcaatggcttttgcggttgtctgcaaagacttttcgtttagatctgtgatagcaattctctcacatcctgctgcggcaaaggctttggctgttgcagcgccgattcctagatcatgttggtgatatatccacaacggtcggctatgctacgtacctgttccaccagcaccagtaatgactgccacgccaggaaacatattgtatgccatgactgatcaaagttaattatcaaatcattaaactggcaagtcaatccagtcaagaagtcgaagtatagcatcgaaactaccccaactcggaatcccacctttatcgcttatcacgggccgaactgttccgaaagtaccccgagttggagtagttggagtcaattctcctatctcgacatcgttaactatatgaatgtactagttatgtacatactatgtactatgtaacatgtagttaactacagagtatattgatccatctgataatatccatcttgaatagtattgttagtatgtccgttgaaattctccattttgtattttagttggagagcatgcatgtgttgtgctgtgttatatcctactataacttacatgtagttatgtttttcaacaacttgtacctcatcttatcgcataatctatctccaattttgccagacttaccccaaacccatatccacatgccaacctcacccctatgatattcaatccctcgtggtttcgtggggaaagtggaccagacccattccgtcttatcgcgcgttagtgtgcaatagctgtgaccaaagtactgtgaacgtccggataaattccagggtgccaagccatacataagcctgaggaaaaacagagataagtgccctcctcagcacttgtctatatataccgaccgtgggtcccccagttcagagctccctgttcactgcctatatttacatctgattggaaaccttctcatcctcgttcaacatggcaattcatacagatgagatcaaggaaacctctccctacccagacgaccccaaagccgtcgagacacaagaaggcgaagtcgacgacaaattcgaagtcttcaaacggggcgagggccaagtcgattttcgaactgtcagttggattcgggcttcaattatctttctgaagagtcagtttagtccggtctcactattgcttctgtgaaaactgacaccgtaatagtcatcttcgcaaccggcgtcctctccatcccatcattgatgtatgagctaggggcattccctggcgccgtttccgtgatagcttggactgtactcaatgcctattgcgctattgtgcagggtaacttccgcaatgcctacccgggctgccattccatcgtggacatggcccaggtggtcggtggaccgatcgtgagggagcttgttggcttcttgttcacggttagttatattattgtcgcggcatcgggtgtcattggcgtatcgaccgcattcaatgccctgtcacggcattccatctgtaccgtttggttctcgttcatcgcgatgattatcattaccatgtgtgctagtgtgcgcaaattctcgcatattggctggctcacctgggttggatttggcagtgtctatgttgccgtttttatcattgtgtaagctttggccacttttcgtctctcggaccaagtactaatggctctagtatcggcgtaacaacacgagaccgaccagcagcagcgccccaaacaggtgacttcgacctcggctaccgagtcatcggtgaccccaacttcacaaccggcatcacagcctcggcaacgatcttcgtctccagtgcagccacatccgccttcctcccggtcatttcggagatgcgcaggccaaaggattaccccaaagcagtctacctaagcatgagcctggtgacagcctcttacctgactttcagcctggtaatctacgcctggtgcggcaagtggatcgcctccccatcacttggtagcgccggcgaaaccgtcaagcgggtcgcctacggcatcgccctcccgggcctgattgtcagcggctgtctctacgtacacgtcgcagccaagtacctcttcgtgcgaatcctgcgcaactcgcgtcatctgcaagcgaacacggccgtgcattggtgcacttggctgtcgtgtacgattggtatgtcggctatttcgtttgttttggcgtgcgctatccccatcttcaactatgtgttggcattggtgggcagtttgtgcttcgcgcctttggcgattagtctgcccgggtggttgtggttgtatagtcatcgcgattattggaaggggaatgcgctgagggtcatgttgtatgctttccatgtctttctcgtgctattagggctgtttttggccgttggaggcacttacggggttgtggtgcagattaaggaggcttacgctgatggacagattgaatctgccttttcttgcgctgataatagttgagaagtgccgaggtctgcggagtacgatgtatacaacatacctcgtcaggtcaggtcatgtcgggtggtgtggctaccatcctcacctgttgttatttagactgttttctatatgagtaattgccattgagactatgatcaacgaataaactacaagttcacctttgatttcctcttggcacttctgccgagtgccgtttccgcaaacgaacccgaatccgccaaataagctgcctttcctctttcgtggacatcttgttatttagctcaatattatcaagatagtttctaccgtataatattggaatgtgtacaatgtagatcttgaattgaacgggcatgctatgtattcgccattatcatttattcgtaacaatttgaccttgtattaccgcactctgtgggattactgcagttggattgcaaagtgacctggttttaattacagtttattgatcctccgctgctttttactttttgctttttgctatgttgtatatggagtactccgtaaaacttcttattcggcatagtcaatgattatacgatgaatagctcgcgtgatacatttaatgttgcccaataagccgtacggagtagggagtgacgatttagaatatttacatagcttacatcgaaataccccttctattgatataaatcatagcttagcacatgcgacccagcacaaataggttgttatagaggtcattgctttggcttggatcatctttcagtgatggccaaagttcgtaaaaaccaatagatacgtaatattcggattttgtgtattttataactttaaggttcaggtaaagcgcgggaagagccatggttctactccatagtgggtcgaccttcttagctctaaccgatgccgatttgctctcgaagctcagctccacagacaattcttcagcttcaatacaatagtgacttatgtggagaataatacatcgtgttaccaggccacaacaaaaaccatggtccctatttatggcttagagcgggctgtatctgctctgtttctgggatagactgactgctattgatcaatatcaggttggcactagagtagacacaatggctttcctagggcaaggctgcctacatgcatgtcaaaatgtcctctggtggctagctgaattcaatactggagctgtattcatcagaagctaggaattgcgtacttgatgacctagcgtttggtatccatcgttacaaattcatcatccgggctttcaataatgtcatacccaggtacctgatgtgtgatctgcagctccttaggcctatcatgtcttcagccactcagccattaactgagacaaatttggcctgcggactacgaagacggacttactcgcttgaacatatataattggccacaaaaaggttgtgtatgctgtagcttagtatccaatagaacgctaattatgcgatgctccccaacatgatccagacagcgtatccattctgtcacagatcgacctgacctacggagtatgtagtcacaccgagatccaccgtatgttgcataaggtggcacagctgaagatcttcgtattatgtcgatcgttgtctgatcggtgtattttgagctagagtcaaagagagagcccttcttgagattacagtcgaatgaaagtgaatgatatattgttatcctatttcttttttatgctctgtccttctattgaaattctctaccccatagaatggccaccttagagcgagctagattcgaggaagatgttttgccaaccaccctcgacaagctcatcattccaaaagcagaggacggcaacttcgcattgactgcattacccgaggccgactccatcaccgaaatcgttgaatctgtcctcggccacgctgttgagctgcaccgtcttcaagcatccggagcagaaggtcaatctggctgctccatctacttcgtccggaacagttcccatccggaaagaaccgtcgccgtcacaaaggtatatccaccggcatgtcataaagacttctttgaagaactcgttgcatatcggaggttgatatctctttccgatccaccgtctgctgctcggcctctcggggtgggaagaacgcgcgatgagaacaccgcagagcctatcggagtgattgtctaccagctcgcagcaggtaaggcaatcaacacaattatccgtgacattggtcgagtctccactctccgacgtatcgcaaagcagccttgtccggaagaaacaagggaaataatgaatgatattgttcgcggtgcgctccatgggatctcaattagtcataaaacacagcaaatccaatcatccaatattccaactgctgagatgttgcactgtcaattcaatggactgatggccgacttgatttctgccgtccaaggagtggcattaacaatggccaagctgcaccgggaaaagagcgaatggagcagtgccagcgaatctgtcgtcgagagactccgcaacaagttacaaggttgggtccaagagattcagggcccatcgcgaaagcagtatgaacgcgctattggatcccataaaatacagcaattggcctcattggttgaccgagcgattgaatattcacgggaagaaggtgtagcgtcactactgcatgcagatgcctcgccgggaaatttcttctgggaccccgttcaaggaattaccatgatcgactacgggggactgacccgctcgatagatgcgagcggccgacctattggaccggcggaaatggatgcggctgggtttcacgagcgactgcgaaagtatgccggggatttcggaatgagtgaagctgatattggccaggttcagagggagttctggaaagcgtaccaggcgcagggtataccgatcaatgaagggcttgcacggttgttcaaaacacgcacacaactatctcgactatggtctgctgtggaaaagcaagatacatcacgcgatgaacataaagctctccagttcagcgaaaaagttgaattcgaatgggaacgtcttgtcaatatctcgcccgaaaagatccaaccttggagagtgctcgtccttgccaatgccagtgggccaggtaaaggaggtctgcctctgttgaatcaagaactagtcaaggccatgtcagaaatccccaatgcatcagttactctattcatggtagagcctgagaatgaagtcaaaaacacattggcatggtcagagcatggtcgggctaaagtagtctgcattccctctaggggagccgaccccggtgccttgctctaccatgtggcgaaggttcaacagccaggagattatggtctgcccattccagatgaccagcatccatgcccattcaatctcatcattggccactcgcgatactctagcaccgcagcttccttgatacgtgagagatggtatcccacagccaaactcgcgctcatcacacatacaagtgctctgcgcaagtcagacatagcatggaagtggtacggacaaacacgcgagcaaggctatgttgaagccgctcggctagcaatgctggacgagaggattcttccaaaagcagatttggccgttggagtcgggcctgtactcacaactgaagcacgagaacgcgagtggatgggccaatgcaatcggccacgatccaacatgacgggacctcgctttcatgaactaattccaggtgtgcgcacgggtgatgcttgcacgcaacagcgacagcccaacgacctgtttcgggtcctcctcgctggtcgagcagatgatcccgccaaaggcttggacgacgccgtgtacgctgtgcgcaagatcgcactctctggaaacgagatctccctggacgtactggggctcccagtagaagacgtggagcgctggcagcaagccgtcgatgagatgacgggcatgccagacctcgtcagattgcaccctttctccgatgaccccgatgcggtctcgcggttctactgtaacgcggatttggtcataatgccctcgatgcacgaaggcttcggaatgattttcaccgaagtggccggactgggcgttcccatcttagtgacgcaggaaagtggcgcaggtcagtttgcgcttgatcgcactcgcattccgccgggacttggccaagcctgtgtggtgatggacgagagcacatatggaattgtcccttcaccgacaagccagcgcgtagccgtctgggcttatcggatcgaccaggtgagatgttacccggagcaaacgagacggcatgctcgttctctacagcgaatcatgcgaggttattcgtggaaacacgccgctaaggctctgcttcgctccgcgatggagggtgagggagatacagtgcagatggcgcatggcagcattgcaccggcttattcatcatggtctcgtccatcgcttgggatgagcgtggtatcgtcaatgcggcgagctgcacgaacgcgaaatcgaagcggaaagccgactttgaagcaggcagacgaagtaatgcaaaatcttccagagatagccccgactatttcagcgctagcagagcatgtctctgctgctgttgggtgtcctgtcaacttgcggagtctcgatcccactcatcccgggggcttttctggtgctatcattttctttgcttttgccaacgatgaatttaccaatggagagacaacgttgtcatctaatgaccgatgcaaagaccgtgcggttgctgtggttaaactgttcgtccacggcttggataatggcatcacggaggagttgtcaagcttagaatggcttcttttgcatacaaagggggacatcaagactgccgccccgttagccgttgggcagatgacgtgggatacgaaaccagctggtgtggtcacatatcaagttgcccccggggtatccctttatcagctcatgatgcagatgggccgcctaccgccgggacctgcgagaagagacatgctatccgccttcattgctggcgtacaggcagttgcacgtaccttagccagattacacactcatagcgttgaagggcgaccaggcacagagtatctccagtggtattttaacgcagcaacaaatcgagtccagcaggcattgctgtacaaagaggttattcgttccgcgggactcgaagcggaccagctcccccagaaaatgaatcaacttattgccgattgcaggcgtgatattgctagtcgtccgcgcaccactgtcgtacatggggacgcccatcctgggaatttcttctatgactgcgcgacagggcatatcactatgatcgacacgacgacgctacactgttctctggatgagaacggtgagccgcttggtgtaccggaacgagatttaggccatttcgtgcatatgctgcgacgaacaggcgaacagtatggccttacgcgtcaagagatgcaggagagcactactgattttgtggaggcatatcttgggaatgcagcagcgccaataagcatcgaaatccttcagttcttgatgtcatgctcggctctgtcattcttgaactatgcggcacagtcagatcagacaaaagtagaactgcaggttggaattttgcaggatttatttcgccttggagagggtttgacacaactggatggaatgcgagttttataaatagaaatcatgggctgctttgtacttagatatttttcggatgtcgtgatctaattcaggagttatgataataattgacactgttggatatgttcgatacctcgatatagttccctcttgtgtctctctgttcttttgatccactgagtagtctgatggcgcctagctttgctagcaagtgttcatcatcaggcaagatgtgccgacccatattcttgacccacttctcgaaagtgattccaatggagtgtgccgtatttggcggtaccacctaatgttgctggcaagacagagcgagaaagccagcagaaatacattggtaagcagccagactctatgactagggagcgagtagtttgggcttcgcatgataggattgcaggtagcagctgtgttcaacctgagcgtggctcttggagattgatcctgggacacaatcctgttttcatgagagaattcagcattaaagggctcacttcgcgaatggattcgcgtggatagtaacgttgttgattttgaatgcttcaaagtcatcaccctccttgggctgagaaactttccccttcttatcgaccttcacattcgccttctcgatatttgtaagaacatcacccccttcgtcctggggggtcaaattcaacaccttcccaaacacagtactggcgccatcaagatgtggcgccggcacgaacgtaatgaagaattgactcccgttgatagtagcgcccgttgcgccctgagagccaggcgccgtcctgtccttcaccggacgagatgccatagacagaatgcctcgcgcattgtgtcgcaatgatgggaggtggatttcttggttcattgctgccgggtggtatatcgatgtgccgccttttgggatctcgaactcgagcattggtttcatgcttgtttgatgcgcggcggggccgagagagatgtctccgccctggaccatgaatcccgggatgaggcggtgaaatggggtgttgttgtatgcgccgcatgcgcagagggcgagaaagttctctgcggtttggggtactgcttcgcagaaaagctcgaccttgaggtcgccttgggtggtatgtaactgttcaagttgtaattagcatcttgccgtaggaggtagagctgcagaatcattggaagccgtatttatatgtgaacttactgtaacagacatatttaggggattttgtaaggtaaactgtgcaagaggcggcatcgaggtaccccggggcctgatacagtgcttagtcatacttttcttatcgacgcgccgggcaatcgtcgcagatgtcccttcagttcagacacagttggctcaatttatattcaaatacgcagaaaggttctcggcaactaccttttgctttttgccttcttaactatccctgtcctgcctggtcccagccatatcctccctggcccctagccccttcctcggacaaccacctcaagaacaatgaacaatcggccggtggaacaggcgttgagcacattggtgccgactcatgccaatgaccttccgcaagaacttctcagctatgcaatgtcactagtggcacagtcccggagcttctcaagcagtctgaagccggaagaggaaattgctcggccttatgcctgcgctgaaatcgcttgcagaaggtgtgccacaggtcccgaatgaggtctttctatggctggcttgattttaagacgctaattgcttgtgtattgccctccttaggttgactcgggctcttaaattgcctccgctgctcggacgtccaccatgtcctccgcgcatatacaaaaagctttattcatacctcgaccgatctctcaactcaagctctaccggtatcaaacgctcagcaagcgtatcggttcccggaacaccctcacgtgccggctcagcgcagaccacaccgacgaagggcgcggcagccaggaacaccccttccaaggcagtagctccaacaccacgaggactacaaaatacaccttcgaagtctacacccttgaaacgaagtatgagcacagcgaaccggctggagagtccctcgaaatcggcaaaaaaggctacagcttcccgaacgaaggatgtttatgggtcaaccatcattccagacgccccagcttgggtaatgacagccgttcggactgtatgcaagattctttcgacacctgccccgcgcacaaatacctggtctaggcctccaatctcgaggaccctgccaccgcatatattttctggcgtgtcgtccgtcctctatcttacgtcgagcatgtccaatgacgaaccgggatgggaccgggagagcttggatttcctggaacctattgtgtccatcgatggatctgagaaggatgatgatttcaaagaactggtttacgccatggttgttgctgtatacttccttgtgctcgcgcgtcggcgcaaccccggaccagatgcagagacggatatcgaagcgcagaagatggataaaaagacatttattgaaatgcgtcagacggcactgaacagccttgggctgaaggctaatgaccggaggcatcgcgacgatgttgaccaatggatcactcttatcatggagcaagggtgggccaatgaccaggaatggtttgagaatatcccctatgctggacagctctatggcgaagacgaggaaggcaggtcctaccaagatctagacgaagaggatgcaacactcaggggcgttaggccgcctaaacgggcggcggctgggagtgggcctcgtgtctcgcagtccgatcatgctccgcggggtggtcttttgcctggcctggggacaatgatgcaggatcgaatcgactggctgagtgatgaccgtcaggaggactatgtgaattggaaagcggatatcatggcccgcatcgaaggtgcagcggcttaataaccgccgtgcgatgaaaggttattccgaaggggacgcagcctgctaatttaattgataccctaagatatgaatcaacatgtaatttctatattcatcctcgataagtaaagaaagcggcttcgccgttatgtctatgttttgatggtagccccttttgctctagagcaacccaatgtcccaaggcaccattctggtaacctaactaactccatgccccgtcaatgacgccaaatccaataaatactaacctcagtaccaaatactcctcgttcggtgatgaggaatggactcattgttctctgcctccaggcacttcatcgtatcgtacaagaaaaagtcgatgaggatcgcattgatgccatatgtcttttgtggtttctctacaatcttcaatttctcatccaactcatccgaaatgtcggtttcgttgttctcattgtcgtctgagatgcccttagaagggagcttttggcggttcattttgacctcagggtgttgtttttcgatctctcgtttgatcaattcaacacaccagatactcgttccacgaagctcgatttcccagtttgagcctggctcgatgggcttcaggtcgcggatatggttttccaatttaggcgcgtagcgaagacagttcagctggtgcagcatctgcggaatgcggtagtctatttatggttagattaggtttgaggaagttctaagatctgcaagaggcgtacctgcaaacatggtgatcttgtcgatgtcatggaattcaccaaagtcttcgccattgaaacaggcccagagatcggcgactaggatctgagcacgtttgtagagtcgcactctctttccgtggaagaccgtctcatcgcggaagcaggcaaagctctctgtcaatatgttgaccagtcctgcagcggagtgattggcgctgtcaatgcagttgacgaagctgccgccgaattcctatctctagttagtataggtcatagaaataaggcgggaatcatacctcgcaaaggacttcgcctgcttcacgtagacactgcactcgttcttcaaacataggaatttctccatctgttgcagataggaatacatgtctaagtagctcttctgtgcacctctcttcatccacccagaagtcgggggttgtgattggaatatctgacgttggggtaagtactcatcattctagaagtagagttagatcagggaactgaccttcatcaagagctctttgtagagcagcaaccagactccaatagccagtccacagcttgccacgatactcaatacagaaacgctttggctcttcgtcctcctcagaccagaaactaaagttcagcaaatccattgtaaatatgaagtcgactgtgctttcatccttggtctttgggtgtagttcgtgctccgaccaggtgtgcgtggaatactctttcttctgcatcatactccatatagtttcggcagcctctttggtgtgagcaaggctgaccgcaatatcaattgcattgtcgaagacatattgagccccctcgagcactttagtttctggtggggcatcctttggtctttcgcccagtccgaaatgctggcgaagaagctctaccaactcagggtcggcttcatcgtcggaattggcttcgacctgatcatttctctcggccggaattggatccaatgatggcatgatattttctccttgtgttgccttgatcttgattcttgattgaaaacaaatggaagatatggagtcaggggtatctcctttgatatcgcgtggaaggattccggtgagaagctagacccagccgatattccaccccacctggatattcgaatcttttgaggctcgaacaagcaaggtgcgatataaaattacttgaattcgacgaaccctttgagtgaccggtgtttttttttttttcttgccacaccgagattttgtcccgatggtctttggatagagtcaccggttatgtaagcagacacaataactagttatgcccataatgtatctggaaagctctcagatatgcgatattgtggtaaatatcagtgatattgaggatttgcatctaggggcaatggctataagcgcaaaggaggtctgtacattatggtttgcagtgacacaggtctgcaggtctagattgattacctggtacctgagaaagatataactatggatagcctcgtcatgagcataaacaggcacatttattttaagattatactcacgttcattgatcatctaaaatagggcgatcagcgtatatgcgctagtatatgcgccagtatacagtgcgataatgcaaatgatcacttacaaggaccagaagatgagaaaagatcagaaaacaacgtcaattaaaactctacatctgcattttactctttcagtcacagaaaaagcaaataaaaaaaggcgtagaccgaaaggaagcggaaacccacgtgtgaggctcccagcaagtgccgtcatcgccaacggtcactgttcccggctcagcacttctttcacttgctccttctttgaccttttcccccttcgcaacttatctctaaaacagacgcgctactacagcactacactactgaactatttcaacaatacaacaccacctgatcgcgatcgtcatctactgcccgccatgcgggatagctccattaagcgctccctcggggtggacctcacccgctccctcaaagaggtaagtacagctctgctggttttcaatcctgaggtccaagtgatgttgtgtcaaaatgtattctgacagttctctcatcacacatagtcgcgcgttcttcttgtcggcgcaggcggcatcggttgcgagctgctgaaaaacctcgtcctcaccggcttcggcgaaattcacatcatcgacctcgatactattgatttgagcaatctcaatcgtcagttcctgtttcgacatgagcatatcaagaaatcaaaggccttagtacgtccaaccgaccaccccgcgcacttgcaccgctcctttgcgaatcctccccgactcaagcgcagcgcattcacatcgtgtgagcggttcagcgataggtgatatggaatactgagatatggatgctttcatctaggttgccaaggaggttgcgcaaaagttccggtctgacgcaaagctcgaggcctaccatgcgaacattatggatgcccagttcaacgtctcgtggttcgaatccttcaacgttgtattcaatgcgctggacaacatcgccgcaagacgtcatgtgaacaaaatgtgccttgcagccaatgtacccttgatcgaaagtggaactacaggcttcaatggccaagtgcaagttattcaaaaggtcagccaaactgatgcccggcttcgcaaattgggcatcttctgacgcgcgttattttagtcacaaactgagtgctacgattgcaccccgaaacaaacacccaagtcgttccccgtgtgtacgatccgcagcaaccccagccagccgatccattgcatagtttgggcgaagagcttcctcttgccgtaagatccagttccaatctgtccgctttgtatactcaccgttgagtagggaacttttcggctatagcgaagatgaggcagcggaggtggacaacacagaagacgctgataacggttggttcgatttgatctataactaggcgctgaaactgatttccgtctagcaaatgaaattgcagacctgcgcaaggaagcactggagctcaaagaattgcgacaatcgattggcaccgaggaagcctatcagaaggtcttcgataaagttttccgaagggacacaatacgattacagggcatgaaggagatgtggaaggaaagggatccaccagagccccttgactttgctcaactccaagaagaaattgcttcgatcgactcgacgatttccacggatgaccagaaagtgtggacgttgggggagaattttagtgtttttagggataggtagggactgtctgtcaccgatagcatactttcgataaactaacatgctacagcttgaaccggttggcccaacgtctgaaggaacttcaagcaaacaaccccccaggccaagattccccggccttgatattcgacaaagatgatgtggacactttggactttgttaccgcaacagctaatctacgagctgcgattttccaccttgaactcaaatcgaaattcgatgtcaagcgtgagtctatcaaataagagtgcacatttcaaggcgctcagtattaacacagcttctacagaaatggcgggcaatatcattcctgctatcgcaaccaccaatgctatgacagctgggctatgtgttcttcagtcattgaaggtgttccaaaacaacttgatgcaggccaaaatggtaagaaccaaagaagagcgcccactactaccgaagctaacaagccatttctctggaaggttttcctggaaagatccggtgctcgtgcgatcaattcagactcattgaatcccccaaaccccgattgcccggtctgttcccctgtggtggctcgagtcgaaattgatcctgaggtagcaacccttgaacacctcattcaaggcgttcttcagacggagctgggttatggcgaagaaatctctgttggtcttggcagtgaatcgatctacgaccccgatttcaccgacaatctggagaaaaagttgttcgacctcggcatcaacaatgagagcttcatcacggtatacgatgaaaatgaaccagagcgaatcaatctcgagctggtggtcattgcaaggtaagcgctatattgtcaagaatactaggcaatattgactgattgatttgcagaaatgagccatcttccaaagattccaagcccgcaacgctgcagaagatggtcgagatacccttgaagcccaagcagcctgtgcagccttctagcgatcttccaactactgccggtgatgcagttgagaccgggaagcgcaagcgtgagggctcaagtgacgaggtggagctcagcagccacgatgtcaaacggctcgctagtgtatccgctcctgactcgaagggcatcgaggctatcgttcttgaggacgatgatgagggaggtgccatcatgatcgacgattgaatgccgaaaatagaccttaccgtagcatctcacgttattaccagcagccttcgcaggtattcatcttgacatcattctcttcatactttcagcattcccctttttttttgcttactacccccttcaacctcttctgtatcatatggcataaaggcgaacctgtttccagtcaacagggttcgaactcacaggttgacgagcatgctttggatatgggcatgataatgtatgcattttggggttttgtgtctcaactgctcagtggcgttctctggtttgatagattactagaatatgacctgcgaataacaacacggccacctgggcaaagtatcaaagttgcgtttgagctgaatcctgcgggcattcctgaaatagttaacggaatggaggtgttcttgcttcaaactggccggctcacctaagaactcgaagggaaatatgagagcacgtcatatgtgcaccagttgcctcgtaaatattatgaaacacgggaccttcgcggagggatagttaccgcatttgctaggactaatggtggatcaacccgtttgattgtggatgagatacatatttgttacagctgttggagaattttgacttattgattgatattacacatctagcttggatcgaactaaactgcacttaatccaccatcgagattgagcacacaattgttggcatactcgttctgcgccaagaatacagctgcatcagcaatctcgcgtggatctccaaatcgatgaagaggaatgacatccttcagccggctcgtttcgcccggggtgaagtctattatcgaggttagtcgatttacgcacatatataggatgcccaaaccaacatacctgcaaccatgggtgtttcaatataccccggcacgatagcattcgaacgaatgataatatctttcattgaagccgacgcctccacggctaatgaccgcgttagaccaagaaggccagccttggaagcagcgtatggaactgcgccagttccgcccttgagcgcgagtagagaggatatgttaataatgcatttcgatgggggtttggtcctcgcagttggatcactccgattccgtacacgacttcggatggaagcacgcattaacgcgcgcgatgtaagtattgcgccttccagattagtacggaggattgtcgagatatcttccagctcggatcttggcaggatgtttgatatcgaaattcctgctgcgttgactaggatgtctacatttgcctagagggtaattaggatgagagtattcattgagatagatgagatcgcttaccatctccttttccagttccagcatccatgatccggcatctgagacatctccgacaagtagacggatctttccttgcgtacttcgttggttgtcttcttccggggcgcgagttacgacatcgttggtttcaccaatttctggtggtatacccacaagagagccaagctttgcggctgcttcctctaagcgtttttgagatcggccgacgaggactatggtggatgcgccttcttgtagaaatcgttcggcaatggcgaagccgatgccggatgtcccgccggtgattatgcatcttcgaccggcaagtcggtttccaggctgaaatgaaaccttgtggttgttttcatttggctgagatgagtatgaccgctttgtatatcccagaggatgacttgatagtcgactgttgacgtagcctacattgcgtgtactgatcggccttgacgaggctcgaagaaataggattggcactcgcatgcgaatcaaaggaactctcaagctgcccatattgtttcaccttgtctcaactccaagcaaaacgcgatatcgggaacatcaggtgcgtcactggggcagcttcagcacggaccaacacgccaacctcagaaggctctttcgctccacagcggtcactttcctacaactacgcggatacgcgtacttcatcatggcgccatccacggaaaccgagtttgtgactatagtctcaagcgacaaatttgaattcatcatccctcgcagcgcagcttatgtctcggagaccttacggcgcatgctttcttcgagtacgtggactcgacattcattgctacatgggtagtactaaccacgcacagataatttccccgagggtcgcaccggtgtatgtgtcttggaggactactcgtacgtttcgcccttgtattcctttttccttttcgtgggcattgctaatgttctttctctgcagcggtgtcattgtcgaaaagatctgcgaatacttttgctacaatgaaaagcacaaggaccaggtcaacgtgccagacatggatattccacctgagttgtgcctggagctcctgatggctgctgatttcttgaatacttgattcccacgtggcgcctttagcctttggtctctcatcacctcgactgagacctcagatatctcttattcttgtttcggctcacgtcgcttttgaaatgattcacggcgcaatgacacaaacattcgacttttacgataataccatggggagttccagactagctcacatatataggcttggtcatggcgtttatgtgatggcatgtattctatgggatacagtgctcttacattatgcaagtatttttcttctttactatagcagtactctggaactttgtagaagacctcttatcccatctgagcatatgcaaacggttaatacatctatggccgaatttgtctaaagatgatggcagatcaacactttccaatgttaacacgctttgtcaatctaccactggcaaagggtttggattataggagacaaattgaacaagaaatcatatcgtatcatagagttctatacttaagatggccaatatcaacttaggctggacctcgggcattccggtggctgagtcagcacctaatgacctcgagagggctggggccggctccaccggggcgaacttccaaggaagtgcccgccatcgtgaagatcactctttcatacattctgatttgcgggatgcagttcacaggagcattgctcactgtggtgttcagtctggttgtaatatctttcggcttttgaacattctatttgcttgtgcctacagttggatgcactagcagccttttgtgttgattgcatctcccccggatcgctgataagggtcacccgcagaggcgcatacaacagcgactcatcatgtcaagcggcgtggaaccctcctcaataccaacatctagtgcggctttgttacaacatttgaatacaacattatcaccggagccctctcctttgtcctctttgccgcatcaactcctgacctccccccttcgcgcctttcaacacgccgagacctttgccttccgaacggttccccgaactttcgctagaataactggaattaaagcccttggccaaactatctggggcggggctggttcaacatctggagccagcggtacggccgcaacacatgcagcggagatggctgcaaatgagttcgccgatacagctagccaggagagtggctactacattgcggagctcttgggtgctatgaagaagcttggtggattctttgggtatttgacaagtctttggtcatttgcttgtctggtggaggtgagaccccgctcttgacttgtatacttaccatgctgatgggtctaggcgctcatcctaaaccgaattactatctatgcatccacacggcgacaccttcgactaggatgggaaaggcgtgcggctctccgattgattcctatccttctcttcgtctcccaaatccttagcctgctccgtggaatccgatgtcagacatcgccgtctttttcgacaatgcgctacggatctcccgggaagcaactcgtattcgactattccagtgacgggggtgctctttactcaatcagctcgactcttttaggatgggagtccgaggaacggtcgtgcgctgctgtgaggatggcgcgcggaaccaacccgggtgtcccatatggatcattttccctactctggccgacattcatgctcctttgcttgagtcacttcatcgaaacactctcttgcgcattgcaaggcaagcctgtgatgactgagacggggatgtccatcttcgagcactcaatcgccttcgcagaagccgagtcgatgatcagtaaatctatcggactaggcctgttcggtcttcctaaacaaagccctcttagtgcgctttctggtgggtctgatgctaactcaacttcggtctttgaacttctcacaaggtcgcaagttttggaacgcatgaatgtcacacccgaactgctacttattgtattgatatcgtgctgcaatagtgcaacttcgcacatattagaagtcttcggcaagcagagcaaatatcggcttttcagcactgcattttggggtgcctgcttcatgatagccatgttgtgggggttagatggcggtccgcccgtcagcctcgaaaccggcgtgctcaggttcccgactgtttgcattgtgggattcatccctcatatctttttactgggcggcatcgtgatttgtctctcaatatacactttagcacttacaatcaccgctttttcgctgccatcggacgatcaacctgtctccctctatgaccgcttcttgatggcgcatgagaatatgcaaggctcgaaccagataaggagcatccgtattaacagacacgaagacttttatacaacgttgcttcggatcgggtatgttgccctaactgcggcaagtgaggctgtgttcttgaacgagggccaatcagtcgttgcacggcggatgacgtggttagaagaggatcgcctttctgaaattgaagcctctaggcggaagtcttcatcttatgggaactggcagagtcagaccagaagtcggcctatcgaggctatgggtttctcaagtttcgacatgccagaacaatctgcttgggagagtggctacaaccgcgaaaaaaagattgagaaacccaagaacggtactcgagccgtacaatctcgagccgagcttgggggagttggcgcagtgcgagtatcgattagattgtggcatgtcctctcgttcttccgcgcaatttccctccttatgctccgttgggttgcatatggactcaacaatgtgcttgatcgattagggataaacgctcggccaatgtggctcaaacgcatggtgggtcatcgtggaaagaagtctaataccgacaaaacgaacccatcacagccattagatttctggattctctcggaaaatggagagcttgagctccccgatgaccatgactttgatgtcgagatcgagatgaggaagcgagagcgcgcgaatcggccagactggatgggctcggatgaaagccggctagaggacagactctacagctggtggaaaattggcggtgcatggggaaaccaagatcaaacctctgattattctccgccctctgatgacttcgacaccacgagcgtggtgtccatgtctaccaacgcctcggattcagaatgggaggataacctatcggaagatggtcgtcgaacccctacccagctcgatccgtatgcagacagggcaagcccaccactccaagatcccctgatcgacatgagcacactcgcccgtcttcttgacccgcgcgaccgcgagagcagagaagaggccaggattctagccgcccatcttaaaacaaacccggacaacccacagatcatgacgcgcagtcgctaccagaaacaagttgaaagggagagatcccgaatcatcttctcatcccgcctccagcagctgaacgctatgaactcagaatccgaagggcggaaacctactccagaagaggaagctgaactcctcgagaagctcattctttcccgtcgctcagaaacctcgggcatttccgactcccatacatgggaatccggggcaacaggcctcggacccaatggtccaccctgtgtggtctgccagacaagcccacgggccattatcacctggccctgtcgctgtctatgcatttgcgaggactgtcgcgtgagccttgccatgaacaacttcggcagctgcgtgacttgtcgccaggaagtcgtaggcttcatgcgcttatgggttccataagtcaacctatttgtttcaatcgctcagtttttttagcttgcactcttttatctttggctcacataggttccatatctctgaacagtttgtaacatattacatttgaagacttttgcttcgtatggcgatttccagaccgtgacttatctattcgctaattgtgttcttgctgagaaggctggtcgttctcgtctctcctagtgatttgcttgatcaatcaatattcagagtatagaacttgctgctccaatctttttctactaagttgtcaaaaaagtcactcagctttatcaaattcgcatggctatcagtcagcactgattttgtccgtctgtctcaagctggttaagaatatcagaagtttaataacggtccttctatgctaacacaacttaaaataactagctataaatcgtccagagctttccccgtcaacgcgaagtgctttccaagtatctgccagcctcatctgccagcctcatctgccgacttcataattcttggcgatcctgcatcttccccctccacccctgttcgacatgatgtcttcttctcggcttcagctggagttaaaacaggtatggaagtcttcctatgtggtctcgggaactcaatcaagctcacgcaaggcagacaatctttctagcctgccatcccaagcccattgccacgagagaagtcgggcagctagatccacagcaaagcacaatacaccgtctggaactcgaagcagcctcctctccacccgattttccaaagatagttaccatcaaacaacaaaaggatggatgggaggaagaagaatttcgacgaaaataatagcatacaagcggcttcaaagtcttcaaggaaaatcgatcccaaggcttctaggtgaaggcttcttcaatgaccgtccatcaatctttcggaaattgtggggatgcctttgcatcagcttgcccgggacgatacaattgaggttgacgaggaagccttgcaggctggtcttttggatgcttttcggacgctattcgtaaaggaagcgaagtattgggatcagaggctagatgatttcctatttcgtctcgacagggagtacgatcaagggagagtggtgattgttgatctcgagcaagttacgtttcccgaggagtctctcccttgggaagaatctagtcaaatcagggaagaaagcatgaactttggcacggcatgttcattgatgagggctttccgccagatcaaacgtgcaacgccattgggctggactagtgggtgtgtcggttgtaaccatgagggaacaattcattgtgaagaaaatggagatctgctaattattaatttgtgaacctgtcaatctagtattgtgtaagattactatgtagaagggtaacccgtttgtaggaaggaggatacagagcttaggcaacatgttagattacttgattgtgaatgaggcctctcttgttgcttgagcagggagaaccatgactgtatgtgaaatagggaatgaatggttgccatgaaaagcaaaatgagaaagtataatctcaatggaaccatattacataccaagaaagccttggtattactcctccttatagaccagaggccggtactcagcctcccacatctggattcgaatccactctcgtagctccgattcactggtagggatgccctctgcctgtgccagtccctcctccacagcacacaaaatcacggcggtggcaatgtccacgctgatttcgcgcacatcttctacatcgggtagcaacggcttcatagagtcttgtagggccggtgaccgtgccttgagtgcctcgacggcagcgactagcatcttcttggacacaagacggcactgcgagaggactgctcccaaaccaatgcctgggaagcaggttgagttgttgcattccgctgaaatattatggttaatatactgaacagtcaatgtccgggacgagatttggatacctaccgatttcaaattgcgtgccgtcatgggcgactggcgggaatggactacccgtagcaacgagagctcgcccatcggtccatttatagagatcaaccggcttcgcctcgtggaggcgtgtcgggttgctcagtgggaagataatcggtcgttctacatgctcggccatcgcacggatgacatcttcggtgaatgctccgggcttggttgaggtcccgataagcacatgggggcgaacctttttgacgaccgacagaagatctcgatcactgtccgaccacccatcgtcgctccgtgcgaaaggtttctggccttcggtcaacttatcacccatggacttcataaggagaccgggcttgtcaatgcacctagatgaaagaatggtgttagcgggggtgtttatcttcctttttcgcagttacataccagatctgctttgatgcttcgtccttcgactttcctgtcttagtggcgatggtatctgaaacctggtcggcaatgccggtaccagccgttcccgagccgaagatcactactcgtacatcctccagattgactttgctgacttcaaggccagccaacatggcggccaatgtgacacatcctgtgccctggatgtcatcattgaaacagggtatctttgacttatatctatcgagtatccttcgagcattatccagaccgaaatcctcgctagtcttgttagccgcgtttcgaacaatagaaaggagcatttctcatacaagtggatgtaagccttggggaatcggttgcgggcagccgcgacaaatctgtccacaaactcatcgtacttctctcctctgacccggcgctgtcggaggccgaggtacagtttgtcatcgagcaactcctcattctacatggtgtcagcaaatgtagacttaaccagataataggtatacctacatttgtaccgcaatctagtacaacaggaagctgacgcgaaggatggattccagcacagagcgtggtaatagccagtttggcaaccgatatgagaattgcacccacaccttggtctccaatgcccaaaatctgccaacaattaatggtaagcagggtatcacaaactctccgtcaagcagatatataattacctcttccccatcactgacgacaatatagtcaacatcctcctcagttccaaacccagagagatactcatcaaagttatcctggtcattgatattcaagaaacacccttcaggctttctgaacaatcgcgagtaattctgaatcgcatctccctcagtaggcgtgtaaatcacgctgaacatctccttgagattggtttgcacgagctattcataggttagtaataatgcacatgctgatgttgtttcgggaagatatcagaaccttatagtacagcacatcattctgagccttcatgctagccaggaaggtattcttggctaggtcccctgctctgctttgatactgctcataagcgcgctggacctgctcatccaatgtctggatgttcggcgggaggagactgtggagcttgaatgtcgatcgctcatggtctgggaaggccgatcctttgttatatttggatccatggaggacatggtttccctatttctgtgtgagaatcggagcttataaaagaatgcggacgtgtggtcaccttgtatgggcaaatcacaggccccggggcgcggggtagatcgcggaatttagagctagagtccgacatttggagccaatgccaagggatacaacgttgggatgaagaaaagcagagaaagattggaatatgagaaagaaatggtagtggcggggtgtggagcacccgtcatcaagcttctcgccacctggacaagagcgcatataaaggcttatcatcatcttttgagaacatggtacaatctagtatatatatagaacagccaaggtatgtataaatcaaaataaagtaaacaaagaacacaagtataaacctaactttgtccttgctggtgatttacatactttttacctttagtagataagttactacaggattaagaatcctaaacctgctctagctgcctggtctattatattatatatagcttgagagatagctatatagtttggagtactttgtacaccatgagcaaaaggtgggcgcatcgcccgtgaacccccgtacgtgattattaagccattagtgacgtcatacaattgaccccgcattctcctttccatttcgggaatagcgccctcccctctaaattgggtttagcgttgtccagcttctgtttattccagccctactggtacaagttggttgatactcaagatgatgatcattctaagctatgctactggatgatgatcacgtgaagtcacgtgccggtgacaacaacatgccggccccgaaaaaaaatctcgtcccgagattgaactgttatgccgtttgggagaaccgtttcggtggctttatgcgaaggtctctctacgtcagggggctagtggttcgcgggagtagcttgttggtggttcgcggccaggggggctgctgttgatgtgacttggtacgcggtggtgtagtcactttccttgacggagccgatgcgggtcgttcttccaatggtctgagaaaagtccgtattgtttgcgatccggatgaagccgaagtttgcgtcgatagcttgttggggttattcgtcgcttggcgacagagcgtggagacttggctctgcgtggacgaaggcttgaaggatgattttgcttttgaaagatcctctttttttccaggagaaacccactggatgctaaccagacatgctaccaaagttacaagttggttgatactcaagatgatgatcattctaagctatgctactggatgatctaagtacagtgatcacgtgaagttacgtgccggtggcaacacctacaatatagaccttcattcgaggttctggacgtaaccaccccatctcacaagtggctgatacataacaagatgttacctatcgcactttgctctcacgacaccttcattttcactttacttgatctttactctctatttatctttcctggtcttacggccaaatgagagactaccatggtaggtcctattgatatgactcgatgccgcctcctataacatcctagtcttcatttacttcctagttgatctcgcatcggagtcccaacacttaatctagtattcttttcagttatctcttactaaatcttcactttgtccttaggttcttcttcctcctctcttcttgtaagccattataaaagctcttgttcatttgaagcgagagttcaaccatccccgatatgaccaaatctattgtgtctatctctagtatcaattccgttaactccctccatttgcaatacgaattcgcgatcaagtgcaagtgggttctcggagagaagaatatcataatctccggcatcgtggactattctctttggtttggacaggctgggaacctagccaccaatatggctatggtggaaaccaaataatgcgtggtggtttattcatcttcgtgacgatggaaaggtatgaaatggagatttataagaactttgggatttactgctaatatatgttctagtacactgaagacacataccactggcattcagacgcctgcgaaatcatctcggtcatttacaaaattatgcagcatgtctgcgggttggaacctccatcaaggcagggtcgcgagttgagcagacccggaaccgaatgttcccggttcaaagttgtgtcgtggacactacggccgtaaatgatactacagctgctgacggtaccgataccaatgatgaccctctgccagctaccgagtacgatgccagctcactagcggatgatatagccgatgaaagtgacctgggcctgcttagggaggcacttatcctacctaaggacggatggactacagataacccaaggctgaggttacctcgcgtactaagaaccaatatcacacgatacgccttccataccgagcgaactttcgtactcgcactctgctgcctttacgatgaatcttccctgtataccttacgttaggacaaggcaaatatatctcacccaattgatagccagcgtaacggcaagagacctggccctttatcaggcggaaagatcgatatgcctaccgtcgcgacatggttcgttttccatttctcaattcatgactactaggacaacctcaagcacaaatcccatctcgctttatcttacgttcgcctaacggacgagggcgttttctactgctcatacaaaatgacactgtactaaagaagttcgcggtttcaggctgactttgactaacacagggatattcgtacctcccgtgtgcctctggacccccttatgattgtataggccaacggattaccctggttcccggtctataaggcgttctacgtcctctgtggaagctggagccctgcgtcataccttgtgggaagaaagtaccgctctaagatcacggatttttacattggcgcggaactggccccacctgccgccgtcctgaccaaacaaagtaatgtacatgggtaactacctactagttatcgtcgcgggtttttgggaaccttggcgggtggaccaggtatctgattacaaatcttatcttatcttgactatttatggagtaggtacctactacggagtactttcactctactttcactctcttaatccgtatataacgaaatcattctccaaactcaggcataacttcacacaaggagagaaaatggctcccacgtacaatgcaagcaccacggccgctgaactagtcgatcatctcgccgccgaaatccaaggcaaggtgattctcacgactggaccctctccgaacagcattggagcaaccttcgtggagacgatcacacgctctaagccggccacgttaatcctggcgggacgcaacacggttacgttgcagcaaacagcagacgcaataaacgctgtatctccacaagtctcagtccggctgctgcagctcgatctggcctcgctgtcttcagtccgccaagctgcgtcggaggttaacagctggagtgatctgccacatatcgatatccttgtcaataacgcaggaattatggctactggttttgcgctcactgcagatggctacgagagtcagtttgccacgaaccacctcggccctttcctcttcaccaacttggtgatggataaaatcttgaattctccatcgccgcgggtggttaatgttagcagcgatggtcatcgactcagtcctatccgctggggagattacaacttccaggtaggctagcagtttcgctccccacttgcatatctaatgtgttaatgtggcgagttgcaggatggtgaaacttataacaagtgggctgcctacggtcagtccaagacaagcaacatcttgatggctacccatcttgcgcaaagactgggttccaagggccttacggcgtatagtttgcatcctggtgtcgttttcggcactacccttgcgaaggatctcgactggactgttgacctcccggcattgcgtaagtgattatcaaaggtattcagaaatcccgcatggctaatctcccctaggcgctgtcgataaatttatggggaataaggagggctggctggagttcaaacaaaaaagtccccaagaaggagcggcgacccatgtgtatgctgcgtttgagccaagccttcgaggtgagacgacgacccccattcgaccgatgtacatgctgatttctctcaaagatcacaacggtgcatatcttcaggactgccatgtagcagatccttggacggataccatcaagccctgggctacggataaggtcgaagctgaaaaattatggaagctgagtgagaagctcgttgggcaggaattccgctattgacagaacacagtagggcgtcacgagggagaataaggctggcatcgaaatgtctctcacttcaaaatataggagatggcaatgtgctgtactgtaacaatccatctccttgcatggacaagacctcggaagacattattcgccccagagatatccgctcttggcacttaaatggcatcatccatcctgcgagaaatcaagtgaagtcactctccatgctgtcggtcgcagaaaaagcaaggaaggtctcaggaataattgtgctgggcgtgtgctggcgtttatttttcggaggtagcggtgacaggaccctagtaggtggatagtcaccaccaaaaacaggattcacgtctccaaagcaggattaccgtctgaaataagtcgtacgttttaacttatgtgggcatctctccatatccttctttttttttcaatacagcctggaggactccgtactccgtagtgtatgttttcctccgtggttaggcagctgtgacgagcggaaggtccgggagaggacccctagtggagaatactttgtgggtagcgaggtgattggctggtcctggcgatatttatgggtccgacggtcctcccgaattttaataaagagcctccagggatcagtggcatcgcgaagaccctaattgtgaacgttaggtgaatagaagtctgtgtttgactaccaagtctatgtctactacacaaggaccactcgatatctcttttcccctgtttttggcctctttttcacgatcatttcctgtatcacgctagtaatgtagccgaatgctagcaatggcttcggtaagccacagcggtctaacatccaatgagtggtcaaagagtacggacacaggccaatgagagagctttgtaaaatgagggctcggagtatactacctcgctatattccagccgctaggtaactaaatagtctgactcttttccatttaaaggggcgcgtgcgtccgtcaattgaattttgcacctccatctctcttcacctctacctttcctttcttttcctacctcaccgtgtgtccaaaacatcaacatgcgtacctcctttttcctcaccgcagctctcgctaccctcggcacccaagccaaggacagcagcagcagcagcgaaatcatcggctacttctctccttcctgggacgcaggccttctccagtatggcggttggaccagcaccgccgccagcctcgtcgcctacaaatccggcacggccacatatcacgtcggctgtctgaaggacgcgcccaagaccgactgcaactacccgtcctcgtggaccatcgttcaaggcccggagacagtcagtctcgatgggaaatacatcgcctctacctcggacaagacctccagctacgagatgactgtctcccagtcgtatcattgttccctgaaggcgtcgaccgagtccgccagctgcacgatgagtgtcagcatgagcggaagcgtcgacggtgcgaaagtcgaatcttctacttccagcaaggcgacttacaccactgccccgatttcggcttcgtactaccagctgaccgtcaccgcgggcctggagtcgattaccactgagacggctacgacgactaagtcgaccggtggtgctgcgggacacgctggtgctatgattacggctgcgcctatggttgctgctgctctcgctgctttgctgtgatgattttcaagatatttcgatcataaggaattacatgccatgactttaattgactgacatcgcgtaaagatctcgtagactggatttggtaaatggaataacgccaaaagtaggatctcttgttttcgtcgtttagcattggtgtaatatcaaaggtcatttctagtttcgccccagcagtgaaaagaccttggcgctgtaatacaagtttctcggagatatatatcttacatacttagtgacgacaccgaactcgagtttctagtttggatatatatttaaacagacaacagagatcaaatcataaacatccatttcacccaaggggtaaaacaagacgtgcattgtattaagcgtgtcaactatacagggaggtaactaattcaggggtctcgcacggtcagccctgctagcaaacaaggaaacaaatcctatgccagcacaagcgagcgaaaacaccgagaacaacctcatattaggtatagatatatttacaggacgtaagcggcagcagcggcgaggacagcaacaccagccatgttgcccttgacattggcaccggcgccagtgtaggtgggcgagggggtggcgccagaggatgagccggtcttggtcactagcggggtggaggtggcaacgccggaggaggagccgacgggggaggacccagtggcggtggtaccggtggaagaggtctcggtctcaacggcggaggaggtttcaacagccgaggacgaggtctcaacagcagaagaggaagtctcaacggcggaagacgaggtctcgacagcagaggaggtctcaacggcgctggaggtctcgctagcagacgcggtaggggttgcggtagtctcagcaggggcagagctcgaggtgctggcgctaacggtggaggaagcgctggtctcgacgggagggaccgagatggggtgaccagcggaggaacactgcccaacgacggcgttggagacagctggatgagtgagttagtgggatgtttggatcaaggggagcaagtagatgggtgttaacatacagacttggtcactgtggtcgcaggccttctgaacacaaggagtgatgctggtcacgagctcggtcttctggcagtggcacttgaagtcgagcagctcggagcagccatcgctctgcaaggcagagatgaagcagctcagctggaagcaagtgttagtaaaccatattctttacatgtaggcatcggttttcttcgtaccgagcaggcgggtacatcgggcagctgggcgctggcgagaccggcagcaacaaaggcaatcagagtggtggagaacttcatcttgatgaattggactaaaaaatagaagatattatgaatggcgtgccggaaaagacagtcaagtattgtatagcgagtgcggatgagttgagaagaggagccaggtctggacttggggagctggatgccctttttataagctttgccagtcgtatatactccgcctgccccatggagatacccctgtgacaaggttgcactcagaggctggcgcgtgggaccatcacatgtctccgcatgcttaatgggaggcaatccaccgaaagcaggcttcggccgcggttgactcagatctgtaattaccacggattggctgagttcaaagccaagcctgaaggctgatgccggataatgggttcccgcagccgattgagcaatgagcgaggattgggttggtgctattgtctcgtacagcgtacgtatgcgcgcatcgccaagttgagactagatcagacgaacgagaaagccaccggaaagactggaccagtggcgacgttggtatgtagtacacttccatttgcggttagtcatacggtgattagggccattgggtttaatttccacatctcgggccagactgctagtggcctcgatggacgacggtacggtacggagtacatgtggcgtggttgtgcagcgttcctactgcccactacccaaagtctttcgtcaattggctataaattatgactccagcatatgtagatacgcaagcctgccagcattgaaagcaataaatgtgcagaaagattcgcaaaaaaagaccaatggggtggcaaaccccatagtattaggaaaatccggggaagacggttggaccccggcagggcccgagagagggtagcatcgaactataccacattgggacttggtccgacgctatttcataaacaaggcaatataatatatcttgtctgaaattgcttggggtaacacacggcgccatcaaggttatggaaagggtcaaaactcaggccacgatcaacaaccttgtgagctacagaacttgtccaatatagggtttatgggtatacagggttgtacattgtagccccaaagacatcccggcgttttctgagtttcattgggcttaatagagaatcacaaactagaaaagattaccgaaacgttagcattctctgaaatatgactcgatcgtgagatattgtacctgcatattacgatcacccccagtggcaacagggtttaaatgttacttccaagtgaaccatttcctgttatttcctaagaaaatggccttggccttgccaagtgagacatttagcgggggtgggccgactcaagacgcagactggaccagatacatcatctttgactttgacagacagtgccaagcacactagcattcatttgtagcgtggggttggggtcaataagaaagagagttcagcaaaagcagcaaaatcaggaacaaaaatacaaaagcaccgatcacatgagacacgactcctagttagcgtcgccaccgagactctgttacgggcgactaaatggaccatcggaacataactctctacagtctttctacatctgcaattgtgttgaccacctaccatatgtatactcttacaaaatcacaaggtcttacgtatgtatcacgtgaccgggtttcccccataagtaattatcctatcatgtgactggatagatacactagtcccaatatggcaagcttattatttctggaccaatcaaaatgcattcatactacactcatattcaggcattgagcatattctatcttagcatccaccttctctatcattatggcttccaaaacatacactagatgttacatttacaatttttgcttaagtgagtcctaagtgaggtctaagtgaagtctgagtgaagcctaggtgaagtccaggtggacttaagcaacctcaagaacggcatgcagcggcttgagaatgaaattcagcagctccaaaagtcatacaagctccaatctcgccaaagtatcctcatacgtggggctgagttagatctctcatgattgaccccgcccatgcagaaatctggaaatgcttcttctatcagcactaccatttgacgttcgagtattcccacgagcaactccgcgattttgtcgatgtctccccttcgatcgtaaagattttcaatttacgggctgatatatcgataccaacccgtgaatggcagaaggtcgaggtgtgcgaccaaaacttctcgaagcctacgatacgtacatcgaagccttccagcagaatcaaattactgcggctccgatggaactcctttcgctggcgaaaagtcgcgggcagcctttttgaggtagtgagaatctcctttgttttctgttttgttttgctttcatatatgataccctctttcgaaatgcttcaattttctgtagcaagatcctacttgcattttcctcaaatcactagcttattacctgcttattcctagccctattttccactactgaatagcagccatattatcctagtgactataggcataccacggcttttctagtagagaaatgtcagaactagctcggtgtccctcaaaaggcaagctgggggtcagaagatcttcaattcaatcatgaccgccgaaggtatcatttctatgaatacccataggtcattcgtatctcattaatatcccccacaaacgcccgatccatgcaagtatgtcaacgccagttcaaatcacggtcccatatgttctcaggataacaattcatcaatatatgctcgctcgcttatatccttccccttgagaagaaccgcaaggacttcgatgggcgggttgagcttcagctgattagcgcgtctccaccgcttgactcgagcaattccaatacagggctaaagagagagtaaatatgttagacgacttattctaaaagagacccggacacataccccatattggctggaaagatcgaaatgccggagaatcttttcctccacatccatgccttgctggtgggctgttgagcgcaatgagccttttaattcatactaacgccctgtgtgccaacctccacttaccactaggtgtcttgcgggcctgctcttgagcccgccaatatcgccagatatcctgcttgttcaatttcagtgcccggttgtcctcttcagatcggggcgcttggtgttcgactgcggcttgttgtcgcaccgctagctctgcgacatggggcttggagggttcttttggggtgacggacagctgctggggctctggggtggaggcagatttgtcggagagcgctggagtcgagtcgagggccttggctttgtgggatggtgcggtgactggtttggtgactcgggcccgggctccgaaggacagtgtcgactgcgacctgggtgtgtttgatgcgcgacgaggcataatgtagaataatgtggtggtttgtcgttgagattggatatgcaatgttgaagaagttaaggtggagaatgaggcgatgtcatggttgcactagcaaccaagggaaaaatctacgaaggcccggtatttagccttccatggttcttaattgggacgttttatattttttatataaattatacatcgattggcgtataaatccacagcggatgtgctaagatttattgtttatcgatttaccatgtgtgatgacgatgatgacattgacattcgaaactgggcgaacagtgtccgataaccattacgtctggtagaaattcgagatcgggtagatcttcctaaatagtcgtatatatagcatattagacctctcgagatatacagaagaacctaataataaatcaaaggaggctcaactcaatcgtggctgttggggggctcagttcatctttccccacccacagccactgtacgttctggaagcccttcacctctcctatctcgaacctcaaagcctcaagacctctggacaacttacccttgtcgccctcttccaacctccggcattcgaggaatccatatgttcacacagttcacctaacccaccgaacccttatgaaccgtgcgaaaggatccgtccactcgcatattccccacaacccgaccaacctccgcatgtctatggtgcgacagacacggcttactcgagatggccgcctttgtgcgcgtatcagggccggcaaacggcaatttcctgatcggatacccaggcatttctgcgaccatggtaagcgccctgtgatacatgcgacgagccggttcggccccctgcgcacgcggccccattgattgttcattgactgactatccaagccacgaatcgagggtaaagttgaaatcagaccctgcgctggtattacagctcccgtcaacatctccctcgtcactatttccctcctccgccgcgagacaatccacccttcggccgacacctttacgaagaagcgcctggctcccccgcggaaagagatcaccgatatcgtcggaaaagagatgctcctatttcgatgtcccgccggccgagaatacgaggaggtaatatctatggatctgccctttgttctctttattccgtttggtcgtggcggccgcgatgcctctcgccgtgtacccccagctagtttacagctcccgagtcgcaccgccgagacctactacgagatggtggtgatggtccaacaagggcagcagcagcagcacaaatatacctttcccgttcctatcgcccgctacgacacgctctccacattcggcatgtacaatcgtccagagtcggcagagcgcgtatcagatcatctggtcacattagccatatcactgccacggtggtcttacggtcctctcgaccccgtgagcgtctatgtcaagctgtcaccgaacgagagctggatgggcaaggcgcggaaggtgaccatcaacaagatcaccattggcatcgacgaggaaattgtctacaaccacgaaggcgatgagcctcagcgcaaagtcaaggtcctagctaagaaaacggagaacattggtgttaaactgccccaatcgggctatttgacaaaccttggtctggtattccccgccaaggacctccgcgacgcagaaggaatcttgccgagaagtagggcggcatttccaacgtacggtgtgagcggtttcacaaccacagcaagtctatataaaatcgagtattacctcacagttcgagttagttcttccctagttccctggtatttccccaatactcacacgacagcaggctcacttaacctcggcaagagacattaccattcgacaaccaattgtggtctgccccctcgaccatgccggctgcaaagaagaaatggaagcgatcgagcaagccgcacgagatgccgcccacgtcaacccggacaaccccatgctacctcttccagcaattgtgcgaccaaacgaccacaacgccctcagccatctaggcgccgctatcgtcggcaaccagaagaaaccattgattgactgagatggagatgatccaactcctcagtaccaacgatgatacttatttaataaatccctcccttccccccgtcttgataccggagctcctggacggtaatcccacatacggggaccgacggttgccattacttttgatgcggaggctgaaggctcctccgcaaccacgctatatcatgacatgtcttacgattgcatacattttggagttggttgcgtggcattcctggaaactggctgttcgctgtttatctgtctgggcaaaacggggattacggggtgtttgggctacttgtttggagatttggtcgagtgtttccttgcctcccttgacttctttccagtgtctccccgctgcatacgtgtattcggtcttttagccgtttggtgcttctttcattcgcacagacccagtcaagcatctgctcaaatagtgatacaatttgtatccatttggaatcatgtacctattaatctgtggatatacggagctatggatctatggtttcaggaatcatctatcctcgttgctgtgtatattgtcttttggaatgcaaaatcgcttcacaagggtatacttatgctagtttgtatgcctttccaggttcctatccccctcgaccacgaccttatatcaccaccctatattatacatgcagcttatttcccaatttccagaaatcccatggcaatgcttagcatgtctccgtcaaccacccgggctttgctcttctggctctcgttctcaatgccccgaagacattctttcaacatttcaagtatggtttggtactgcctcgaggagggtccaaaggtcttcagggcattctcaaggctgtttgatatctatattttgttatttcctgcgtttcgtagttgtactgggcgatataccttgcgcaaactttcgttatagtccacgagatcttgacttcttccgtccatctcatatcatccaacaaatatgcctgatatttcgaaatcaaatagcttgactttgtgaggggcatatatgtccaactgaccgctctcgtcaccgcctagttataagaggcaaatcgcccttagccgggcgtcggggccacctccagctccctctccacttaagctcggggctgctttagctacctttgtcccttctgacatcgtgtctttactctacgcttttcaatcaactcatctagcctcttgagaaagctccctcctcttatccaagcccgaaatgtacaaaaaaatcgtcggaggttgcatccgattatttgtggtcgtcttcgtcatcattgagattgagaattacaccaacctcattgaccgatacccgatagcttgtaaagttgcatttttcctagcattgttcggctttttatggctctatggcatgtacagagatccggagtctgaacttaatcaagacgacaaggacccccgacattgaggtttgcaagaaacgtttgcttttcgacaaaaggctggaaatatacacaatgctatgagccgatggctttccccgcgatcacaatgcgagatgatgcttttaatctggcccaggcggcttggaaatctgaccgattccttgtttcttgctgtgtttgttctcttgaatcacttcaatagcttagatcttatcctcactaatattcataacgtacttactctaccgcctgctccataaatactaatactacaaacgctagggtgcttacatgaacctagtggctcttcaacgagtcagtatcattcttactgctgcttctataactgtagtgacctatttcctgtacttaaagtagcatttctcctataggacacaccgttcgggttcgatcgacttcgggtcgaggaccctcgttactgcatattctttccaaaccaaaaagagcattgccaagattgaggagtaacagactgcgttggaattgaaaggtccaagccaatgaacgacgtccaaaactgccagcaacacggagtatccccggggttcctccgcatctacgatttcacaagaatgacctccagcatatactccaacatactccgtatacttgtaggtatcgcggaagttgtttgagcagcatttcactagttatagttaagtcagcaggctggtggaaggtgcttcgcaatggagattcattctccttcgtccttgattgagatctacatagtccgagccaaccttgcaataccccactttgatgccggggtaaaacatgttggggtaaaagatataaaaaggtatgtgtttccctgattttgggtttgaattcccagcagcacagctaaaatggttcacttatcaaggggtgttgtggccacatgtcttactctccttgcgcattcctccggtattacggctgaagaatcaagcacaaatcgtgagtcctgtgtttctattagtttctcatttcctaaacctaaccacctcctatagcaatcgtggcagatggtacttcctttgctctcaatggaaataatgttgcataccgcatccatgtagacaataccactggtgatctcttaggagaccacttcggcggctctgtcggagctcatatccctctggaagttgtaggcgacgtccatggctggaatggttatatcggacgtgtacgccgcgagttcccagaccaaggccgaggagatttcaggacccctgcgattcgcattcgtcagtcacaagggtataccgtgtctgaattccagtacaaatcgtacaagatcatccccggaaagcctgctctacctgggttgccagccacgacgggcacagaagaagatgtgagcaccttggttatcagtctatatgacaagtacagcgatgttggtgcagacctctcctactcgattttccctaagtatgatgccattgtgcgcagcgtgaatatcacgaatcacggaaaggcaaatatcacaatcgagtctctggcaagtctgagcgtggatttgccgttcgaggacctcgacatgataagtcttcgcggtgattgggcaagggaagcgcatcgcgaaaggaaaaaggtcacgtacggcacccaaggctttggaagttccactggctactcctctcacctccataaccctttcctggcattgacagagccttccgctaccgagtctcacggagaggtatggggattctcgcttgtgtacactggttcattctccgtgaatgtcgagaagggctcgcagggcttcacgcgtgcccttttgggtttcaaccctagccagctctcgtggaatctgccgcccggggaaacccttacttctcccgagtgtgtctcggtatactccaaggatggcatcggcggaatgtcacgctctctacatcgcctgtaccgcaagcatctcatcaagagcaagtttgccaccagtgatcgtcctacgttgttgaacagttgggaaggattgtatttcgattacaatcagagtagcatctacgacttggcaaaggaagccgccgaagtaggtgccaagctctttgttctggatgacggttggtttggccgggaatatccacgtctctccgacgacgccggactgggcgactggatcccaaaccctgaccggttcccagacggcctggggccgattgtgaagaatatcacggacctgaaagcagctaactcgtcaacgaacatgcgcttcggtatctggttcgagccggaaatggtcaatccgaactcgactctgtataacgagcacccggactgggccttacacgcaggaccctaccctcgcaccgaaaggcgcaatcagctcgtgctgaatctcgctcttcctgaagtccaagactacatcatcaagtccgtctcagacgtcctcaagagtgcagatatcagttacgtcaagtgggacaacaacaggggtatccacgagatgccttccccggccacagaccacgcctatattctcggtatgtaccgtgttttcgatgaactaacaacccaattccctgatatcctctgggagggctgcgcctcgggcggaggccggttcgacccaggtgttctgcagtacttccctcagatctggacatcggataacacagatgcaatcgatcgcatctccattcagcttggtacttcgctcgcctacccgcccagcgcgatgggtgctcacctgtccgaagtaccgaaccaacagactggccgcacagtcccggtggctgtccgcggacatgtcgcgatgatggctggctcgtttggcttggagctcgatccggctgtaatgaacgcggaggacaaggcggctctgccgggtctcattgctcttgctgagaaggtgaaccccattgtccttactggcgatatgtggcgtttgaaccttccagaggactcgaattggcctgctgttttgttcatcgccgaagatggtcagaaggctgtgttgtttgtcttccagctcgctccgaatgttgctcattcatggccacgcgttaggttgcagggattggatgcgcaggcttcctataagattgacgggggtgtggtttactccggtggaaccttgatgaatattggtctgcaatttcctttcaaaggtgactatggcagtcaggttgtgatgttagaaaagcaatagagggcacctgcaatatgggctcgatatttatatttgagaggcaagggctgtgagcagtcacactctttggtaggatttgactcctgaacaatcgaatatcaacccatacaagattgtccaatgacgagtttaaatacccacatcaggaatattcaattcaataaacgtgttgaacgttgatgccatagacattattctgccggacgtaaaaagatccccgcttatcgataagcgcaacttttctgatctccgactctgactccgaaattctagcctctcatttattctttgcaaacaattcaacatggcagacgcagacgaggatgccgttcgcgcacctgcaactgcctcgacagaacctgatattgacctgtccgatgagacgcaggatttccgcttcttgaaccacttaaatttgtatgaacacctctccgacatggcgaaatctccattgtcaatcgcttcaattacccattgcttacattcaatctctcgacagttttgccgattcctcccctagtatcccgcgccgcggcgaaaaagactttgagcccaacccgacagaactccaggccgatgtactctccgcttcgcgaggggccatgcacaatgcgctctcatacccccgtcttcacggtgccaaaactcgcatcatagccttctacgcacccgacgggtatgttcctccagttcaaatcgatcgcgcgacaccgaaagctagcggagaagatggaaagagctcggagtctacccccaaacccgcgaggcctttgcccaattctgccagaatatcgcctgacgcatgtgtctatgtgcccaatccgaagggccagttctttaaaacaatgggccaggcagattcgacaagtcgtatctggctgttgccagaggaagccttatatctaattgagcgaggaagtctggatatcagatggcctagcccttcggggtctacagaagacctatccgtccctatgagcttgcaggctgcatatgcgtgcttcatgggccgcggtggtctgacgctagaacggtactctgtttatactggtctcaagcgcctgggttatgcgctcgtccgagctcctggatggtgcgacgacatccagcagcaggatgcagatgctttgggttctagtgaaataacaccgcccaaaatacatggccccggtctggctggtatgcttgcatcacttttcaactggattcatgaccctcactcaacggcatctacggcaactggccctataatcggcactggcattcaccgaagttacagtgagtcacacatttatctccgcgcaattgcctcagttctccttattgacaaaattcttagtggatgtataccgcaagctcgccatcataccctggtacgacccagttaccgcgcccgagagacacccctttgataccacaccacccttccgcgtcgtattccacatctacaagccctcaactcccatcaaaaagtccgcgcttcccactccagacttccgcatcgcggtcgtcagcacacgcgaccaaactaccatgcccactatgacacaacttggtgctttgctcgaaagcacgccacttgaccctccgcgtggggagaaaatggaccgtatgatgtacatgagactgcggcatggataccgcaatgtcgtcatggctgttgtcgatcagggtgtagtcagttatttgcgaattgctgattcggcgttcgggaaggagaagctttatgagaacaagggtggacctcagggtcataagcggaattatgcgaatcagaagtcgaggaaacgttgagagactcgggttatcaattcatgccttggtcgattacaagtccgttgctggagagaaggcagcaatagcctgcagcggcaatgccgtttgtgtattagaatcgtgcacatactatggatctggcccgtatatccacctcatgtcatcttgtccggtgtggatcacagcgagagctgaaaatgctctccgcggtggttggagcaattggggttcttctttcgaagatggcctacactggtcaccgcacttcaacagatagctctcgttttgagctcggtctgattacacattggagtgaagatctatatatcgttttagcattttcactagaagaatgacccaagcttatcagctggtacatattttctgggccatttaagtaccaaggaatttacatagtcggatactactcatcaagatctaaaaaccacaatatcactgaatcataaatcataacattctctgagtaacattcccccgtattcgacgagtgactggagtcttgcataccatgcaatcatctagcacatccatagcaaattacatccccaaatcacagcctgtacatctcgctcttacttctcgccccatcaaagacacaagtattatcaagcggaccatactgcctggtaatcaccttcaatgcctcctgcgcaaccaaaccccccgtcaaagaagagatattatgcaactcgccgccctcagcccgacgcagttccttaatcgcgctggcgatctgcacgcgcgcctcctgagaaaccgccgatccatccgccgcagtcagcagagctaggatccgttcggtgtggctgttccacagcccgtcgtcgtcaacagagcggtcctcttcatggccgctcgattggatctcgtccacgaccgagtcgaggatctgcgtggcgatgaatatcggaatcagggtgtccgggacgttgagctcgttgcggatggttttcagtgttgacgcgtcgctgtcgatacttatctgcgggatatcgcggccgagcacgactttgatgtgtgcggcattcttgcagaatacttcgatatctcggtctgggattgcggaagtttggcgtctgagattggattcaagctggcgcactgttgttgtcacttcttccacgtcttgtcgcgctttggccttgtatatgttttgtagtgagacgtagtctgcagactgggctttcatgtctggtagggagcctgggagggggaggacgccatgagacgcgtggaaggttttgatggccgaggcaatgacccagaaatcttgggatgatgctgacagctgttgacactggttcatgtcgaaaacctcacggatcgagctgcgtaggctgaatggcgcgattgtcttaagtacagcagcgactgcctcatcaaaattctcttcgccgccttctgggttagaagtgcgtgtctgggaccgcacaaactctctgaactcggttttctctttgtagttgctcggtgcgttgccttcgtgagactgtttccattgctccaggaagtgaagcaggagaagtatgtagggcacatggccgtgctgatggtcatccagagtgtctaggttgttcagattggctgcagcggcaacaagctcaggccagggatttagcagacgcaggtcctgggttgattctgggtccggatgtgtctcaacaatggggaattcagccggcaattgcacagagaaggtggaatagaacccaactgagtgcaggtacagcacggggatacctagctgctttgcttcctgggtcagaggtaccagggtcgagcgtctcattggaccggaaataatcaccagcttgtgctggggcaagaagtcagggtctacaagaagctcctcgatgcgctgttttataagtcagtcaatgatcatctacttttggagacatggagacatgggaaatcacaccttgagatagtaatgtccctccacgtctggattcagttctttcagcagtcggcaggtttcctctgcacgggacttgcccagggacccttcttccaggaagaaattcacgcccagatcagactcggtgactattgctgggtcgacgatagtgaaaccgccaattccaggcagtacgagattcttgagtgtctcaacgccggcaacaccggtgacaccagtgttgtattgaccgagagggccatctgagttcaccagcaggacatgagagtcctcaagtgcttgctggccagtagctgcccacaggcggagctggcgatcatatttgcgctccttggaggttggccctgtcagggcggcggggaaggcatccgtcatggtggatagtagtgcgggggaggtgatagagctttggtttgaggctcagaacattgcctgtctatcggtatgtgatgcttctcgtgttgcttacagtatttgctcttcaatcatgcaagttcctaaatgatggagcagtggatgtcgacttgttgatacgcgactatatttaggtaagcgcgtgttgtggcctgataatccaggctgacacgcagagcctcattggcattgatattgttctgacggtctgttccatagctagtttattgtatatagacaggtttctgtccgctgcgaggaagattactcccaatccatgaccaactactacgacccctagcttggagttcttagatgatgaaatgaggtcattgccagagggaaacagatatagccagcttccatgctgttaaggatgtttatttgtgatttacccttgctttgttcattgctatagtattcaatggagttttactttataaatgtaaatatattgtggcattcttgtcggtataaagagtatactattcgggtacttgatccgatgtggacttatacttcctgttgttcataccacacgactaataatactcggttatattacatataaccttgatcaatgctattgaatgcctaggcctggactttataggggaaaaaatacctgcaagtgctaaaccgcacaacctgtaacgtgacgttatagtggccataaactaaagataactatagattctatcttttgcttaattccatttcctcctctattttcatttcccctcaaaaaccaccaattccgttataaagcgcgtctataaagaggattccatgatccaaccagccctcatctcccctcttttcctctgccgtagacttaccctccccaccatccccacactacttcacagcactttgcaaagtcctcaaagactccaatccaccatgtccaccgtgtctgccgtcgaagaagccaagcgcgccgccgcaaaggtcgccgtcgaaaaacactaccccaagaatgcccgctgggtcggtatcggcagtggtacgactatcgtgtacgtcgtcgaggccatcaagaacctgggcgtcgacacctccgctacaaagtacatcccaaccggttaccagtccaagcaactgatcgtcaaagccggattaacatccgttgagtacgacaccattccactgggaacagtcctcgacgtggcgttcgatggtgcggacgaggtcgacgaggatctgaactgcatcaagggcggcggtgcatgcttgttccaggagaagatcgtcgctttgcaggctaaggagtttatctgtgttgctggtaagttttggtctggtctaatatgattttatttgcatttgcattgtagttgcgggggtatgggatgctcggaagtagagccaacactttttcttcttttttctttctttgctataaccccctactaacccacgctcgcaatctcagatcaccgcaagctccaaccccgtctccttacaaactggaaatcaatccccatcgaggttgccccgatcgccgcccaccgcgttatcctcaagctgcaggaactcggcagtatcaacccggccatccggccatccgcgagcgccaaggaaggtcccctcaagaccgatcagggtttcttcattatcgatgcccccttcaagccattgctgatcaaggctgatatcgaggctggccaggacggtagcggcaaggatggtgtgtgggaggttggtaccttggctcgcgagatcaaggagattaccggtgtgcttgaggtcggtgttttccaaggccaaaccggcccgcaagctactgctgccggtggtattggaggtcagcggcctgtcgcggcctacttcggtatggctgatgggacggtcgctgttcgcaaggccgatgtctagtggttggactagactacgtaaataatgtagatgataccaggattttcttttttgttaaaccttgggaaaaaaatgccatgattaaatttaactagtaaaagcttgcgattgtgttttggaatttctttttaattggatttcgcgtgtggtatcaacattggaaagacgcttcatttcagtatggaatcaagaaaaggccatttcgcctggacctattttgcgctcttactcttgcctttggcctccgtttcgcctaactcccgaacgtaaaccttcactgtgccttcggggacctcgtcatggccgtcttcgaatccaggactgactgcaatggccaagtgctggccactcgcactgaacgcgagagctgcgacgctatgttggtatttctgatattgacggatacggcgcttagagattccatcccagagcgcaacaacaccatcaccaccgccggacgcaaaggtgccaaagatagggtggaaagtcaatgcgttgacagggtagacgacgtccacgccatcgtcgccggtctggcggtgacatttaaaagcgtatttgcgggcctgagattcaggcgacgggtcgaaccattcgaccgcaacacgaccctcaatgctagacgaggcgtacccagcgtcatcaggcatgcaggcgacggcgcgggtcatgaacttcaagctgctctcacggcgctgccagggctcaacttcaactcgattactgcttgggtcggcgctatctgcttctgcggtgagaagggccagtgctttgaggtcgtagatgtgcaatgcgcgcgatgccatcgccacgaccagcttcgtggcagttgcggagattgagaatggcttagacgggaggggaacgataatcggcagggattcgaggtttgcgccagtatcggcttggtgaatgtgcagtgtggagtcccacgaggcggagatgacgagcttgtgctcgcggctgtataggacatggcgcacgccagcttcgtggctgctgagcacggtctgttcggaggtgttgaggtcgatcctgattaattagtatattccatggattacaagcggggtgctgatagtagcaggacccaatggaaacaactcacttcctcacgtcccaatccagtccagctgtgtagatctcattctcggtctcaccgaagcagacgtccaggacaggagcgcggtgctcgaacttctgcaatagctttccctctccaaattttccattctcatcccgcaagtcatacagatatgcgttcttatcccatgaggaaaccacgagtcgcgcggagttggggtctggggagaacttcaaggccgagatagcatctgtaggtggggaagccaaagtgaattgatctgcgacaagaaattagacatgattcaaatcaaaaagcaacgccgagaactactcacgagaagtcatcttgggcgagctgcggagttgcagaagatcaacacccaagctccccggggcccttaaccgtcttcttttctgccatcgtcaccgccctttgattccccgctctacatcgataaggaaaaaagaacgtcctgacatcatttgcttttagcacaaacacaattcctcacatcttcgtgatattgataagatgccttttgcccagctggtgattggtccgccgggcgctggcaagtccacatactgcaatggtatgcatcagttcctgggcgcaattggccggaaatgctctgtcgtcaaccttgaccccgccaacgacaagacttcatatccatgcgcgctggacgtacgtgatttagtcaggctagaggacatcatggaagaggacaagttgggtccgaacggtggtgtcttatatgctcttgaagagctcgaaaataattttgactggttggaaaacgggctgaaggagcttggtggtatgtctgacatgtcctggctgcatacatttactgactggtttgatgaattctcagaggattatattcttttcgattgtcctggtcaagttgagctatttacacatcatacttcattacgcaacatcttctacaaaatccagaagatgggcatccgggttagtggcagcaaatcttccagcggaacacaaaggaaagtcagctaaccagactcctcataacagcttatcgtcgtccacctcgtcgactcctacgccctcaccctcccctcaatgtacatatccgccctcctcctctccctccgcgccatgctccaactcgacctcccacacataaatgtcctcaccaaaatcgacaaccttgccaactacgctccactccctttcaacctagactactataccgaagtacaagacctgtcctacctactcccagaattggaaagcgagtcctcacgactttcacacgagaaattcggcaaattgaaccagactatcatcgatctggtcgaggaattcggactcgttgccttcgagacgctggccgtcgaagacaaaaagagtatgatgagtctcttgcgcgctattgaccgtgcatccgggtatgcctttggtcccgccgagggcgccaacgatactgtctggcaagtggctgttcgggagggcatgggtgtcacagacgtgcgtgatgtgcaggagcgctggatagatgccaaggatgaatacgatcggcaggaggagatggatttagaggaggaagttcgtgtgcgcaatgcggcgagccaggtcgaagcgacgggtgccgtggatggcggacctgacgaggatgacggccatgactacgacgaggagttggagaagtggaaaaaggatatgccagacagtggcgtgcgggtgcaccgcaagtaatcatcctgctccaatgacttccgagctgttttaaacgtcagatacgatacgataaatgtataatagccgaaaataaccatgcataatctaacgcaccaaaaaccggggtatctcattaaaagaaaataaatgtacagtaaaactcatcctcacacaatctcaatcatccatcccctcattctcactctcgtccataacacagtcaacgacatcagacccaccaaccaaccccccaagaacccccctctcctccgcctctttaaccctaacaatctcccgcctagccctccgaatagcctcctcctccgccttccgcatcgtccccgaaacccgaaccacgcggaacacacacccacgctcacgtcccgtccccgcgcgtttctggccattcgccggctccggaacgccggacatgtacgtaagcgccgaccagacgaggcggaaggaggcgcgcggacaccgtactatagcggtggacgttgctggcgagaggtattttactatatggtgtggttagtggttggttctatggatgggggagttggatgtgagggcctagggaatgaaaacttactcgttattccgccagcggaggcaccgcctagctttccgatcccccagtcgccgtatagctctgcgacagactcgcggatcattttcgctaggaagccttgggttagggcgtcggaggttggggagtggattgctagttgggggatgtgcggttttgatgttggggttgccggccaggtttttgggtctgggtaaagaatgtccacgaggaggtagcggtttttgaggcggaccatgacggtgttggtgtggttgtattatgttggtggtgttgacgtgggttgggttcgggttgggttaaaaggaggcgaaacttgaaaagcagtacggatagggtactggtggatcttttgagttatgcgagagctgggtatagacgtagttgctgagtagatttatgtcaaggtggattaatcttgaagctgtgaccaaaaatccactaagcctaattaggatggatagatatccatgcatataccttttcgaatatccacgtcaactcttctcgtctcgactctgctcatctcaaaactcacctatctttttcaatatggctgtttacacccgatcatcccctcttgttcaacaaatacagcaaagttctccatgggtagacatctacaccgattctgctaccagccctctccgtgtccgatcagtcacgcataatatcagttctgtctcacatgcacacccagagcctagaagatggcagaacccaggtggttgggggccaagacatatgaatgacacagctccttttactttgtgggacgacactggccggaaatatcgtttgccaactaaagaggaattccagtggattagcaagaagtttggcgacggaaagatctccctatccggttggtttatatgcattgcgaccgataacccgccgaagccggttcctcttacactaggatgcatgccggtgatgtttgtcggagtcaatcaaagctttcttgagcccttgcccaaagcaccttatcctaatccacgattaccggacccttgtcccgatctacgctggccagcaatggaatttccaacagatgcagataatatcacttttctcgaagcactggagccgttggcccatgtacgtgctgttatgtatctgccttcatggattatcattgagcttgagtatggagattcccgagtttatgaactcaagtcccttccagggattgttgctggacgcacagctctttatcaccatgcagtagctcccttccataagaagatgaagaatcttacccgaggccaacagcttgatccagctgaatcccagactagcttgagaccgttaccgcaagacactcacaattatcttcagtactcatttctttctcctggacacagaatcgaatctggctatagcctatcagactccggctatgagtcaacgacccgtgcttcgtctgctggagtaaaactccgcaattcgaggggagaagaggccctaagtatcgcttatcacggcttccccatttcctcggaggtctatcatctagatacccaccaggaaataattggagatgtgatcaatatacgacctgaactagatgtggccctcgttaaaccgacctctaccgcgtccacaaagtttaagaacacctgctattttcaagcacaaccccctaagacgttgttagaaggaaaagatatcagggcaggctcatgggccgaggttgatggcatgagttcaggcttactgaacttgctatcatatggaatgatgaaggaaaaacccgtgtctggctctccaaaaattccgttcgcacagtggcggtcattcaatctccagacatcttggggagttgtgaacgaagtgatcgctaaaggtatctgcggcgcaccgattgttagctgcgataccagcggggtgaccggcttcttccatctttttgatggaatgaactgtcttagtgctactctcgatgatttggtagctgaaggatggcaaattgcctgaatggccagagcaccgatggttaggagcactgatgctcatattcttacgagcagtatctatataggtaagcccaatccaatatttaatctagcggctcaacaatgtataatgctatgtaactcttggagaggaagctatacaatgtattgtactatctggactgctcgactggccctccacaccatctaaatgcctttctagttgcctatttgaactaatgatagtagtttttcggtactctttttatgtctttttggcatggttgaaaattgcggccggcggtagatatacccaagtagctagcggggagtcttttcccctgaacataacgaatgctatggactacgcagaaaacatctatgcggcaatggcacgttcattatttcccaaataggtctagtcatctactgcaaacgaattaaatcagatccatagcctggttgcacccttcttgagtgtcaacctgtcaacttggtcatgccacatgaacgcaggtacatcgatacacataactgctcagaaaacataagaaaagaaaatcaagggatgaaccatccaaactccaccgtcctgaacggacggactatatgccagcggacggcgttgcaaacgtcataaacaaaatcacaggttgacctcaacacggccctcggcaccacccttctgcagtgtggggaggaggtaggtgatatcatcccaagggtggcggtagagaccggtgcgcaggcgcttctgatcgaggtagtgggcaataagaccgatggagcggccgagcacgaacagaccgttgaggacacccatgcgcatgtagtcctcgcactcctctggggagaaggcaccgcagttgcggaggaggtcaacgaagcagacagccacacagccgtcgacgttgaggatcaagttgtccttcttagaggtggtgacagtctccacggcgatagcgtagtcgagcagcttggtgctggggaagtgcttcttgacaaactccttgacgagctcgacacggagatcggggttattgcgagacttgaccttgtggccaataccggggataagcttgttctccttgcgcatggtgtcgacgaagtcacgggggctcagacccttgtcaaaggccttggtgaactcctcagcggcgccatccagggcaccaccgaaacgcgatccgatggtcagcagaccggaaacgagagcgctgataaggtccttgccagcacgggtggtgatgatggtgttcatggcaccggagacggcaggaccgtggtcggcggtcagcatgagaaccatctcgaggaacttgctagcgtaggggggcaggcggcgacggaaccacaggagagacatgacaccaccaatgccaatatcctctttgaagacatcggagatgggcataccggcatagagcagctcctggccacggtcgtcggagatggtagagatgaaggcagcgggtttacggacgagaccgagctcctgggcccaggagtagtcgatgggaatcttgggcaccacgggctcgggggcggggacgatgttgcctttctggagctcacggtcatagacctccttgagaatctggggaaggtcttcgaaggtctcggggacgtgaatgccagcttcacgcatggccttgttcttggtaacggcagtctcgagatcagagttagcggaggcaccggcgtgaccgaactggacctcggtcttgaacaagctggcgcaagttccaatagcccaggcgacgatgggcttggtgatggtgccgttcttgatggcctcaatcacacggtactcctcaacaccaccgacctcaccgagcagcaccagaatcttgcactcgggctcggcctggtagcggagcaagtgatcgatgaaggtggtaccggggtaacgatcaccaccaatggcaacaccctcgaacacaccgtcggtgttctgggagataatgttgttcaattcgttggacataccaccggacttggagacgtagccgacagaacctttgcggtacaacttggaggcgacaatgttgtccatcataccaccggtgttgccgatcttgaacgcaccgggcttgataccaccaacagtggcgggaccaataatggtgatgcccttctccttggcgatgaccataatctcacgagcacgctttgatagtcgttagcaatacatccgagatcacacggggagaggcagaacttacacgctcgggcacaccctcagcaataatagcgatacagcggatctgggggtactccatcaactccagggtagaggtgtagacggagcgagaagaagcgaagttgacaacgacgtcaacgtcggggtgcttggccatggccttctcaacgtcctggtagacggggagaagggtctcactggtaccccagtacatcttgctgacgaactggccaccgaaggtgtagataatacccgctacggaaggagtcgaacgcttgcagatgaagtcgaagtcgagcatgccctgcacggctcggggttgcataccactgatcgctggtcagtctcttatttcgagattgtaggagcagaatcgcatgacttactacacgaagcatcgtgtcttgttgtggaaaaggctgtgtagggcgggcgagaggacacggctaggaggggcgaagcgggtgatgttgtcgttggcagactgcacgccgttgccagcggaaagagtaggggagggcatggtgaatctaggtctcaattagcatgccagttggattgcgaggcaattggccaatggtgcaggcaattgaaaagaaggccgtttcgatggtggatatgcaatggataagagggggaagaaaaagaagttactcactttatgcgttaaacaagccgctcgatgcgaaattagggtaaataaagaaaaggaggaaggggaggaggtaacacaggagaggatgagaaggagaagaagctgttgagaaaaatccgcggggtgagatactcggagtactcgcagatacaccgtacagctcgtcccagaccgctggactcgagcagctcaacacttggcagtcccgaaagtaccgggttcggacgataccgtacccaccggtatggtattatggtacaggtaatacgaagctatctggagtatgggggcattattggaatcctgatgcgatagtacatccatgtgtatacgtatgtatagttagttatattctaccttgaataagatagtatatatagtatatgtagtctttttcttcccatcttactgaatctgattgaatattaactcgaactatgtaccgttatgtactatctatcataagtttatccgtgtagacccgattccggaaagtcatgacatcccagtctctcgactcaacggaatcggagtcaagtgtatactccggatatacctcatagtcagtagcaccagtggcgccaccaggagtacctcgcatgtattctcaatacacgtaacattgtggtggagacctcccaacgagacctttccccaccttcgatctccgttcctcaacaggtgggaccggccgagttgtacgctgtaatctccagaacaacttttcctttttttgtgtacgccgtacactacagtacattcccacctttttccctctcactttcttacctcccagtccaattactcctctttatcctttcttcttctctcccatctcccatctcccataatctcatcacatcatgtccgccaaatctatcctcgaggccgacggcaaggccatcctcaattaccacctcactcgcgccccggtgatcaagcccactcctctccctgcctccgcaacacacaaccctcctgcccgcctcgcatcccttcacttccccgaggataaggctgttaaggatgtccttgaccaggcggaggtctccttcccttggcttctgacccccggtgctaagtttgtcgccaaacccgatcaattgatcaagcgtcggggtaagagcggtctgctcgccttgaacaagacctgggctgaggcccgggactggattgaggctcgtgccacgaaggatgtccaggttgagactgtcactggtgttctccgccaattcctggtggagcccttcgtgcctcacccccaggagactgaatactacatcaacattaactccgtccgtgaggtaagctttctccgcatttcgagcacaattgaaaggaaatggaagctaatacccaattctagggcgactggatcctcttcacccacgagggtggtgttgatgtcggtgatgtcgatgctaaggccgagaagctgttgatccccgtcaacctcaagcagtacccctccaacgaggagatcgccgcgaccctgctgagcaaggtccccaagggtgttcacaatgtcctagttgacttcatctctcgtctgtacgccgtctacgtcgactgccagtttacctaccttgagatcaaccctctggttgtcatccccaacgctgacgccacctccgccgaggttcacttcttggatttggccgccaagctcgatcagactgctgagttcgagtgtggtaccaagtgggctgttgctcgcagccccgctgccctgggctcccctgtcctcgcctcgaccagtggcaaggtcagcatcgatgctggcccgccaatggagttccccgcccccttcggtcgtgagctgaccaaggaggagaagttcatctccgacatggatgccaagaccggcgcctcgctcaagttgaccgtcctcaacgccagcggccgtgtgtggaccctggttgctggtggtggtgcttccgttgtctacgccgatgctattgcctccgctggtttcgtcagcgaactggccaactacggcgagtactctggcgccccgaccgagacccagaccttcaactacgcccgcaccgtgctggacctaatgctgcgtgcccctgcccaccccgagggcaaggtcctcttcattggtggaggtattgccaacttcaccaacgtggccagcaccttcaagggtgtcatccgcgccctccgcgaggtcgccaatctcctcaacgaacacaaggtccagatctgggtccgccgtgccggtcccaactaccaggagggcctcaagaacatcaagtctgtcggtatcgagcttggcctcgacatgcacgtctacgggcccgagatgcacgtcagcggcatcgtcccccttgccctccagggcaagaagaccgatatcaaggaattcggcgcataaacagtttaatccttattttatttgttctttgcagcgtgtgtccgttgcatcggtttgtggtataatgcatggcatgatatgacttgttttttgcgggattccgggggaggtctgcgggtgtagatgtcaccccggcgtcctattttgctgagggtatggcgttacttccgcccgggcgacaagacccggtccttctggtgccgacgtacatgattctccgttgattagatttcattttcctatgttcactcccggcggatttagatcgagtgatgtccgtcggataatatcaatgatacgcatttattgtcccagattgttccattgtagttttattatatgtcaacatgaagccagtagatcagatactgtatacgtccagctaaaacatgtccaatgcgaaagtaaacatctgaaaacacaacaataggacaaaccactgcccaaaaataccagcgtaattaatacatacagatacacctgtaattttgaataagctcacatccacgacccaaaagacaaacaagctcccgcaccagactccacacaagctctcatgcaccccggattgccagggccctcagatcccgcgatcagatccgtggataaagtagggactgtgctggagctggggaccataccgaggtgtggacgcgacttccgctgccccgagattagggcaagataagcatcggacgaacgggggctaacttgttcttatattcaaaggggattagtgcctgtggtgcttggagttgggttgggaagtgggctaatgggatataatatgcgttttcttcatgtaggttgctctttcttgtctgttgagttggtgattgtaggtggtggacggctctggcgtatcatcacttacgcgtgtaatttatgtctagctgcggccatggccggatatgagtgctggtttgaaaccattggattatcatgttggatcagttagactgatagaaggtttctttgttgtggatatgctctaagaattcgttttatattgacgggcgacgtgtgcctgagccacggtacaaagaagccaggccccaagtagaagtggcagagctctatatgtggtatattgttcgagaagaggaatcgtcactcgatatatttcaaagggctagccaggatcatgtctgtactggctacataatcagatgaacctatgtgcatagacaaggtcatttttagttgtgattcaatatatatcttgcccgatatcatataaaatgtagtatctgacacttaccacaactgactacgtgatacaattattactcaatggcgctgttcaatcaccaccagcaaccgatgcacacccagtacgctatgttgttatccgtgagatatatctcctaaccacttcgctgtgagtacccttgataacgctaacgagcagatattgaacagtctaagaaaggtcgaagttgcgaggatcaaggatattcagaagcatcccgaatatgactagattgagtgttgcattgccatttgtgacaaaacctagtctccaaagttcgaacgccattcgatcagcgactgggatcgaccgtgcatgcaagggctatgtgctgaaaatgtacgatctatacccttgaatagagaaatgtggggacaatgtgcgtcaatattacttattattactgcgtgattcaagggattatagatgagatgggaaccctactcggactattcatcgcaacgaactaggttgattgaattggtgaccggccagcatggcagtttactagggtgtaaccctccaaggcatttttagaattcgccatcactcttactcccttcggcttcttttgagagaaatagttgttaatacgtcacacaagctctcggcctcgacggaatggggtggctttctccaacctagaccctgaatatataacacactgtccctggccgtagtgaacacgaatggatcaatacagagaatataattggatactcgtctatctatgagtctgagccaagtcagttggatatgtagatcaattgggtcagccagccaccacgattgctttccaaatgtggttagtctatagatggtcttgctatctggtttcgatcctagaaatgttagaagtgtaggagtcggcaattccttatctaagaaagaaaatagaagatagtacgacataaatagcaaagatccaggaacatcgataaagtattatagacactagacattgcccgaggaattagggcccaccgtggatctactctccgcgcgaacactccgattcaccaatcagataatctcatgcacagatcctagtcccaataaagcccttaaatgaaaccgaaagggggaaaaaaataacttcacttttctttaaaccccatccgccatggaccggtatcaatcaaacggacgactgctcgctttcttcgtcctccagggtctcattccctcggttgtcctaatcacaacacctaaacggtccgctatacgttatctgtctataccatgtatgatatggatcgtgttgcatgcgatgtacccaattcagggaagggggttcacatcgacccatctcctcgcaagttgtgcaacattcgtcttgacagcactagatcttctactgatcaacccacaagccgggcgcgacttcgtcgacgcaaatggaaacatcaagagctttatacctcgtctagtcgaggctgtccggttaatcacattcacgcgggctgttaatacaccccgacaagtgaagaacgtcccgcccttcccggcatactacaccaagagagatcccaaggtgatcccacgaggtcgcttcttggttagagaaactgctattgctgtctggcagtttctagttctagatatatgtactggtctgatcttgaaacaagccatgaatgaccaagacgaaggaaagacaagttcttccggtatcctgggactagagtggataacaaagactcttattcaagttgccattgcttggctcgttgtgtgtcgtatcctgatcagcttctactaccgcgtcgcttcgatcatctttgtcggcctgggggattctcctttgaacagtccgccgattattggcagaacggcggatgtatatacattgcggaatttctgggggtgagtcgctcttatgcttattcatttgattggatcaatttctcatgcttctcaaagaaaattctggcatcaaatgctacgactgcccctcacgtcgactagcaatttcctagcgcgggatgtgctccgtctgcccagatcgtcgcttgtggagcgatacaccaacgtgtttatcgtgttctttttctctggtttgatccacgtcgtactcgacagtctgcgggatgtttcaccgcgggatcctgcgactatgtcatttttcctctctttcgttatcggctatataattgaagacggtgtccaggctctctggaaacgaacacgcgggtcccgggacaatatcggcttgccgacgtggtggcagaagactattggctattgttgggtcctgacatggctgggggttacgtctccttggtatttcaggacgaagatgttaaagccggaacagcatatggtttgggttcctttcagcgttgctgggctcattagtcctcttttattgaatagtatagtcattggcggtggtcttgtgttgaagttcgtatttgagggagagatttgaaaggagagagtgtggaatatactggatttcgaagtttctccagctagatctccccggggaatagcgaagcacgacaatgttgtacgtagagaatatatgacaaaaaaacccatcgtacgctgatcaagagatcaactgatactaacgtccgatctttgagactagtacctctaggcaataataataccctgcctagaatatctacgaaggaaatgaattagatcaaagaaagcaaactgttctgactgcgaaacgtaggtggggctctgttgagcttctgctctacataaatgatgcaacatcccctaggcatgagaataataacctcaacacacgtgcggaaaacattagcctcaactgtcattgcgaagcagaaaaaagaaaacacctcagaaacaagaatcaagtccagggtggcatagcttgtccggcagcgtacttttggctcgcttgttgaatcatccgggcaatcatctgatcagcgggatctgttcgtccatagatttgaaacgccacttgcagtttctccagccatgtatcctgggctagagccaaatcagcgatttcgtagttgtattctgactggcaccagaacaccggtgtcaccgctccttgctcgactaccttgacggcccaatcatctaacaatccttcctcttcgagaaagacaaccatcaggaggtgaaggaccattcgagacataagcggtatgttgccggtttccgcagcagctttgagcttggggtcgacaatcagcgttgactgtgagctttgtctttggccgtccaggtccactgctcacgtaatgtagagtattccgcgaatcaatcgtcgtcgcaggtcgctgagtccttggaacggagttccaggcagacacgctttgcaggagcacacaaaccccagggattcatgacgctcatgtctggtttgagctttgagatctgggaagtaacagaagtaaatttcctcgccagcctcgatttttttggtggcaagaagttcgataaacggccttgggtcacttggaaccctcgcgttgggtatacacgaatgattgaaccgcgagccaagggtataaaaccctatagacttaagggcactggtaaaatagttttctgacaaagtctcaagcaaacctttaggttcctccgactcattgttttgaattagtagagattgtaccagctccgtgggcgagagttccataacggccctaaaaacatccaatcctgtgatatcaacagaggacttctgaatcacgaaaagggccttttcttttaagatcagggatcctcgttcaatgcgttttgtggcgaaagcaccccatcctttgcctggagagggcttcagctcgaatggtgcatcgtcagggtttgagcctgcgataagctaaagcggatagcaagttagaaacactctctagcaaatgaacagggcaacgtacgacgatttgcagacatggtgttgtgtggtccggtacgctgatggtgatggaggaaaggaaaggaatgagtgtgggattgcagacctggataggccctactacctaggtcgagcatataagtctgtttgctttcaacaaatgctctttgtttgtcaaacatcctagaaccaactaacgaggagaaattaacaatggttatttttgattacgatacttgaaacgaaagctgtttattgtcatgcaagtactatgtaggtgaaaataagggcctttactttctgaccatgaactgaatcatatctagctcgaagactaaggtcctggtcgaagaccggtagaaataactgctccatattcatataaatacctcaaccaacagataaacgatcaacgcccaaaccgctgcgtgatagcatcaccaggaggcaactccgaggagaaagtcggagtccgagaaattcgtggaagtcgagtccgatgttggggagcgggatctcgacctttgcctagtcagaagcacattagccggcatgtcttggagaccttggttcaacacatactatttcgcccatcccagtctggccgagcagggggaggcattggggctccgcgaggtgtcctcttccttgctcttttggaactaccagtgccgctccgttgattccgataaagctgctcgactccatctgggttgacgggaaatgtgggagtcttgggatgtcgtataatcgggacagaaggcaacgttgaggtattggacagaggaatggaggcagaggcacgttcaagagcagaatcagggacaggagcattgagcgatgagagagcttgggagactgtgtccgaggctgcggtttgcatccgggaccgcatggcacgagctttgaggaggttgtagagattggtcatttgagcgagtttattgttcttgtcgcggtacatatcattcaattcctgatttttcttttggaggtcttcttgggatgattgcatgtctgtagtacagatgttagtcagagctccagttaagagtggactcaattggaccgaccagataacttgttctgcagtgacatgatctctgtgttggcattgtgaatgaccttgtccatctgcgtgttcaggttggtgtacttctccgtcagcgtcttcgctcggtattcctggtagaagctgctcgagtcagccttagacaattccacggtacagttttataccgaggaagtgagacatacatctcctgtgtgctttggtatgcccaaaatgcaagtgcgcgaccagcacattccatgattgtgttcggatctaacccactcaacacgcttgttttgtagtcctccgtcggattcaagattgtcgaaacagcgtcatccggattaagaagtgccgtttgacacgcaggacagagccgattgctagtggttggacgagagagtccgaggctctctgcgcatccatgacagaatatgtgtctgaaatcgtcagtcttccgcctaagctgatccacgagagagttacttacgagcaggttgtcaccactgctttctctttcaattctgctcggcatttgagggaattgcatcttaaagaaaagtccatggtgtcgttgcagatgggatgcggttggagagcataaccctggaagaagtgaaggtcacgagttagcattggtagatgttagtttagtcaaccccaaaggaaatcttcaatagaacaacaacttggacagagaacatttggtatttgtctattaaaatgattattttcataaatttccgcgggctagaaaaagaatgtatttccctgagcatcgcgccgtgttgaagtcatcttctcttcaaactctttcccgggctcatactcatgccacagactagctgggtagatatgcttgtttttctcataccaccgtcgatctacgaccttggtttctgagaaatccttgtctgcaccctctagttgatcgtcactaggtcgagacagcggatcgtccgtagaattggtggaatcggtaatggggggtttgttggaataatcaaatagcaaaccaccagctcgagagagactgggcactcgattggcgatgaagtagtaaaactcgtaatgctgtgggaacattagactagatacttaaccaccgagaatcctgacgggtgaacttacatgtggaacgataatatcgcccttgacaagcatcaagtcgtcgacgctgactcgtgcccactctcggcgattgtctttcttcgccttggatgcaccgctggcaccacgtacgcccatctcagcaccgactttccggcaccgatccaagaacaaccaaacatggtcacccttcttaactttgacagctccagctggtatactcgttccatcgtagaagacaaatggaataagaatatcagtattcttaacagcctcttgcatgatcaagaactccttacggagagtatcgcgagcgagcgcttcagcttccaaggcagcctttgtcaaagctttgggtggagggggtgcattcgggtttgctttcatgcgtcgagtactgttctcggcgggtgttttcgaacctgaccgcgatacgcttgagtcgcgtggagttgtcgcggattcttccccggtctcatcctggtcatcaccgaatgatagtttgctttttgcgaaagccttctttttcttctttttcgggggaccgtcactgcgagaaggcgttgacctattgcgctgcgatcagctcaaagaaatgggaatgacaatcgaggctcttggcttacccgtcagttatatcgcctgcagagggagttgcgcttcttgaattaccagatgccagcagccccaaagacttgtcatgcgcctcgcgctctttcgcctctagaacatccgcgcgccgcttgcgaaattcggagagatgaacaagaccgacggtttgttccttgagcatctcctccgccgagacggtttggcctgcgaaggaccgtggagtggatgtgctactctcatcttcttctgccattttggattgcgaagataacaagctcaggtttggctactgagatgagctggtttgtgacgtctggtgctggcacgtgatcttgaatttctgtatattctacaaaatcactatattataagaagtattcacgctttcaaaacagaagaatatcaaatccttcatctgtaagctactttgcattcactgaatcttagaatccagaacattcaagcgtgtcatggtccctgtttactccctttcacatatttcacctctcacaccgctgcaaacaagacaaactcggttccatgcgcgcaaccttcgatctcgatcctctttgatacaactttctgcagcatttacccgtcaaattgaaattcagaaattatggacgaagaagaagacgacttctatgatccggtcgacgcggtgccgacaacgcaatcgctgaaccatacacaaaatgcagcttcaggccaaccgcagagcaattacatggaagaagacgatgaggtagaagaagaagatgatgatgtacgcgcttagcccacacctaccttcaatttttccttgctaattctatctgcaggatgactttaatattatcacagaggcacccgaaggcgcaccagctcccgaagcgtgagttcgctgtgattgcgcttcttgcactcactcttgctgatctttctagctctcacccgcgccatgcaagcttacgacaagaaccacaacggccgtcctctgcagactcgtcggggttagcgaggtctgcgacgccatccgcgattcctcgatacgaaacagcgactccgattcccggacacccagccggggccgcaagaccctcctcagaaaaaccaggctccgcctatccagccatccacagttccaccatcgacgtcaatgcgaatcccgtccaccctatgacagggaagcctatcatgtccacggacatggatgccgacttcccatccgacgacaagccctggcgccgacctggctcagacctctctgattacttcaactacggattcgacgagttcacatgggcagggtattgtctcaagcaacaaggtgtcagacaagaagtcagcagccagaagagacagatggacgatatgcaggccttcatgggtatgggaatgcccccgatgcctagtgcgccaggtcccgttgccccagtcagtgctgcgccgcccatggctggcatgcccggtattccggatatgaaccccgatatgatgcagggtatgctggccagcatgatgtctcagggcttggacccgtccaatatggatcctatggctttcatgcagcacgctcagtcgatgatgcccggtgggggtcagcagagtcaacctggctttgggggccagccccagggtcaagggtttaaccaaggggctcagggtcaaatgggctatggcggatacgaccaacgtggaggttacgggggccgaggacgtggccgaagatggtagtttgatattgaattcgtattactgttcaccctcggaataatgggatcacacggcgtttcatgcatacaaagggaatgacaatggtactggacaatttacgaattcgagcttcttcagaagtagaggtgtaggttgggaatggatgtacagcatacaatgtagctgaaggatggcttaggcatgtcaatgaaagaaccaataacacctaaacatcaagagataaatatttcaacagaacacaagtgattatatccagagacaaccaaagaggtccaaggaaaacagggctgttcggaaagaagctcatggttaagtcttggcattctggaaatttctccagtccagatcttcttcccccggaccaattccatcttcttcccttctccatcctcatcctcaacccatcctctcacgaatctccctcaccttaacaatggtacgttgaacatcccaattgatgccagaccccgatattccctatttccttaactcccggagcatgctagcacctcaactcccaacttttccttcctccaggccgagtccggctatccgaaaacccgcgcgcgatccccaattcagtccggatgtctcattgagaaacatattcactaactcgtccccttcacagtctgtcctccgcaacatcaagtccctcgctcccctcctggaccgcgtcctggtccagcgcatcaagcccgaggccaagactgcctccggtatcttcctccccgaggctgccgtgaaggagcagaacgaggctcaggtcctcgccgttggccccggtctcctcgaccgtgacggcaagcgtctccccatgggtgtcagcgccggtgacaaggtcctcattccccaggtatgtggtgcaacaattccttcgaaatacacggaacattatatactaacgtgtctgtgctcagttcggtggtaacgccatcaaggtcggcgaggaggagtacaccctcttccgggatcacgagtatgtttcctctctctccctctcactcccttttttttgccgagaacaacaactgacaacctcatctagtatcctggccaagatcaaggagtaaattagtctccaagacgatatttttatacgatattttgtttcgccgccattcatcctccttctgtcatgtcgacaccaatccccgtttcgctgtaaaatcgcgacggggatattggaagacccctgacgtgtatcatactgacgcgacgtcacgagctcgacctctctcaacgatctcaagaacaccgaccaaggaaaaaaaaacaaaaaataatagcgaatagggatgctctcattggctgatatttgacattcggttgtttaggtatcatgtccgttgtgggctcctattttggcctgtctttctattttgcatgcatgagtttttgaagcgctggattggccttgggtcttgcatgtctttgtccactgtacttttaaattaaactgcgacttgccttctcccagtggttatgctggggtgggtagtcggtaattgcagacttgatcatctcctctccattggcatattctccaattcttcgttgccattagaatgcgtctttctaaatatcttgaaagtcaatcaacgtgcagtaaaggtgatattttgataggctaaatatgataattaatactgattctcagcacgcaacaattcgtaactgcatctccccccatcttgctaataatgaaagcccatgttcccgggcaactaatcaatgctgatctgagtaccgtacatatcctcgccggtctcattctcggtgctcgagtgcgccattgattcaatcacctccgacaccctgtacatcagctccgcgccgatagtagacccgtattccctaatcctccgcgagcgttccatatttataaacacatcgaaagccattgaatctgcgctggcattgacaattgtctcatgagagggaaaggaaggtggatattggctgaaatcacgaacgcgaatgttatccaaaatgaagcgcgccgcgaaaggattaatccccaggtcgcggagagcgacttcatagtcggactcctcgtctgtgatattttccatcatctcagcgggaaacaaatcgtatcgaagtctccccattccgaaacaccacaatacaatgtataacgagtggttcgggatcggtatcagtaacgttgtggatagttcctcgtagctgtcacaaaattcagcgagcgactggctttctcttctcagagaagcattcgcaactctgctgacgtctgccctgtcaggtttgcagatgaggataactagaagcatatatcgatgcatgaggcggaaaatcttttccctgaacggggaattaattcccgcgattccattgaaccttgtatcccttggtccatgccctggaagataccgctgggtcagttcatgcggggttgtcagaataagtccagtatcaggtgccagaaggatctctgcatcacactggtatcgggaatcagcgttctcatagtttctgtagatcaacttgggtggattagttggccacccctccatatctcgcacgactaacgggtgagtggttaggagggtggtagacaagaagaacctcgggggcgggtagaatgccgatctggtcacgatctcctgcatggcgaaggcagggctcggcgagcgagacagacccgagggtctatcattagggtctgggggactgtcacccatctgtgaagggtcgtttgagaactcgccttctccaattcttgtggaccctgacagggaaagggacgacggatcattcgacgaggtgatatatcctccatcactgcctctggttcgcataaataaggatagcgacccgaggtcaccagacactgctttgagtggtttcggtgtctttttagaatctacagaagaaataggaagtggaggcttgaaagggtcttgtctcaatcctgtggagggtgacttgtagcccaatttcatacgaaacagttccatctgagcgaggcaagactctctcttgtccatgtctgaggaaatatgtgttgccgtagtactgaggttttgctcgtaaggaggtttgaaggaaacattgttatcgtttgcattctgcgaatctcgggctagctgggtgatgatttgatcgtttgctggccgggttactgaggaactcgaacagccccttgacacgattttgccttcatgaagcgtactgagagaagcagccacgactccctcctgttcacaaggtattcctggatccgccacaggttccaaaaaagccttcgttcctttcttgcccttcaaagctctcggtacttgcgctttctggctgtcaaccctgccaacggagaatcctttttctttggtcagattgggagaaacatcagtgaaagtgggttgcgatttgttgcatgaactgacatcgacgaatggaggtgaggacgcggcgttctcaaaatcaaatgcactgaattcgctttcagtgggatgcttgtcttggttagctaggcccagcaataatcaccagtcaagtactcacctcagagttcggtacactcagaccgtgagcctcgctatcgaagtcaaaggggtcggcctcattatgagtgtaccgatcataagccccgctgtcgtagtcaatagagtcggtctcaatactgacaaactgaggcaccatccctgatgaacccattaaggggggaaatgcgtccccatcacgatgagaagtcgcactagtgatattcgggcatgcggcaggaacatggcgaggaatagtaaaaccatcagctatgtttgactgaggcaagcccgaattgtagtaattaaagatatcccgcgtgttcacaggaactacaggaacatcaggaccactaggaacaaccagacgaaccggggcagaagacgaagaagatgtagccggactctgagcgaaagcagcgtgaaactcggacgaagcgatcattctctcatcctcagttgtgaggagaataggctcgtctttgatgtcagaggtcatcacttgaggaaggatgccgcgccagatgtttcccttgacggaatcgagttggagacatccgctcagcagctctagatcctcaggcttagtttcgagcctctccattaagaggtcagtgcagaagcgttcatcgatttctttgaggcgttcctctggattttcgagctcgagaccctcaataatgggaacataaattggcagctcacatgtctcgtctgcgtaatcaattggacaaagcttagtgtagtcctctgcgacgttgtagaatctggcgtattcaagaagagttggctggttggaagtcattttgtcgcacagaaaggagaggagaggagaggggaggggagagggaggagtgagaggtggtgacgagagaggattgtttacgggagaaagggaactgaagagttgggggagttgccctggtgagggagttgggtggtgaactgggaaggtacgggagacaacacacagtcccaactaggtaggcacgagactgagaccaaaaaccaagatacttgtctgaacaggcacatgtaatgattcaaaagagaagaaagataatatttcgcttatttcgctgattgtaatatgtcgctaagtgctatgagagaaagaacatatttcgattaccatgaaccctctgcggtccgcctagtcgttgtagttcgactggcgagacccgtccttgttgactgccggcagtccagacaaagcattggattcatcctcctgagactttccagtctcttcaagcacaggtttctcggcgtggaccgcaacacgcacagcatggcggcggtggggcgtgaagccataagaagcactgtggttggtagacctgttatcccaaagcgcgacatcgtcctggccccatgagaagcgggcatgcatctcctgcgtcgtggcgatcacatcggtgaggaagcggatgatagcgtcgctttctgcggtagggataccgacaatcttcttcacaaagccaggattgaagaatagtgagttccagccggtgactgggttcgtccgaatgagtgggtgttcggtggtgacgggttcccgacgcactggccggcctagggctcgggaatcgttggcctgcatgtcggcggagtggagagctgtgaggcctttgagatagttttgcatgtgcgaggagagcaagtcgtaggcggcgtactgcgaggaccagagggtgtcgccaccgcctcctcggggtgggccagagagaagcttgagagatgtgtaggacggtggttggatttcataggtcacgtctgagtgccataggaaactgggtgtgaagagggcacggttgtcgggggcgttgtcgccagcgtaaacgacatggacgtcctcgagacctgccttgcgaggaacagatgtggtggcgtgctatgtcttgttagtatatccactcatgaatgagctcaaagtcagatatcttaccttgtgcagcttgccccagtattcacccagttggcgttgagcttcgatatcgaagttcttctgggagcgaaaaaagacaacgcctcggtatgcaatcagccgggcgaggtcatcgcgctgtgcatcatcgagctttgagagatcaacaccatggatttcagttccaaccttagggttgtaatcaaagacagctgtggcatccctcagaaggttgcggaacttggcgtctcctcgcagtcccttgtcctcgtagggagtgtattcaagcggggcccagtggagatccgggaatgacggcaaaagatcttcgtgtgcatagttgtcgtgtcgggtgactggagtctggccgggctgatagccgaatttgttgtcaccagcgtcccgcgcaaggacaggaacggtgaacttggccacagttggggccacagttactacgggctcttccagtgatggggccatctttaacgcaatagacgatgtatggtatgtgaaattaaacgcggaagatggaaatgcggaggttgaaatgcgaaagatgaatgcggagtgataatggaagattattgagattattgatatcaaagaatggaactaagttcgaatagagagggcgaactggcttatatagaacatccaatgccaagtgagtcaaccccagataacgccattctggaacgacgacggatcttgcatggccccggagttcacggagatggcgcaatttctcaaatgaatcacctcaggcaaatacatgatggagtgcctgggtacgagataattggttcgtgatggatattgtattgcgatgagacccgctctctctcctctaagatattcaaggtaatcacgcaattttgctgacgttgaaggcgaaattggccatcttcctcaaatcaacatgggaaactgctgctcggtcgatatgtatcagctctcaccgctgtttcagaggcgagctccaaccaagtcaatatcccctgaacgcgtgttcaaaggattgaggtgttgatgtcccgtgcaggagagtggatgttgagattaggaatggcgctaaggagacgatcacgcaagagtggcgggtttttgcgacggttactcatcagcctcactggccccatgcctagttggtacaacaacatgcagctattgttagtatgctatagttcttgaatgcattggattggctaaagaattcgactttaattattaagattcaagcccaggggtctagactgtgttgtattgtcttacgatatatggctacgtgtttccgaggtcgacaatgaggtctcagactaatgagagttcggacttgacagatcaactgtgtggatgtcatgtttcgcatgctgaagatcagctccataaaaatacagatcaaagtcgctaaattctcctatctatcccagatgaagccggccatcgccaagggactgctgtccaatcgacaaatcttggacttgctccgatacattgctcagacgagtggcaacacccatgatgccagcctcaacatctgcgagaacacccgagagttcactgagggtagaccggggtgtccctgtagatccctcacgcgacttggagctcacaaagtcgctgatttgacagttgagcgtagcttcaacaccatgaagatggtcctcgatctctttgaggttgccggtatatcttgtcagaacttctttcatctccttcgagcgatgagagaagtaatcgacctggttgacggggattccattgacgtccgtagacgcgtcaccctcaacgccgtcgggaagagcaagtgtgtttttgcgactcgaccgcatagatcgctccggaatctgttgatcctgcacagaccaccacccaccgccagtcgactggtattgtagagggagcttcagcgtatcgatggctcggaaggcaacttgggcctcggccgcatcccgtgtaacaaggctgcgcagcgcatcaatgtcacccgcatcgttctcaagcgcatgttgcatggtctccaatttgccttgtacaaattcaacgtcgttaggaattgtagccccctgcttttcgatggtcgggagcagatctccgacctcatggcacatcttcatctggttcaggatgtgcttgtcgatagcctcgatttggctacggatctcgtccgcgcagctctcaaattttgtggttggcaggagattgctaacgtcgactttcacgcccgggattactgtgctagtagcggtgctctgttgtagtggtgtagtctgtgcgggtgctggctggccgaagagagagagggtaggtttttgaggttgttgttgttgttgttgttgggctgtgttctggccgccaccgctgggatttattagaatatagccatgacacgagacgaggaaatggtcgggcacttacaacatgcctcctgtacctcctcctgttaatccaccaccaagcagaccacctccgagtccagcgaaggctggctttgcttgagtctgggccgtagacgcaccgccgccgaaaagagagccacctaaaccaccacccgttgttccttgagtcgtgccggtgccagcgccagcagttgatccaaacaaattgcttgccccagaaggctgtgtagtggtatttgcgcctccaaaaaggctactgccggccgcaccgctctgctgttgacctccaaacatgttggatccagtcggttgtgctggtgtggttcctgtggccgtgccgaacaagcctcctgctggtttaggtgctgtcgagctcgcagtgttcccgaagagactgctggtattagttgcgccaggagtagctgttgatgtggccgtgttgccgccactgttgatgggaggttgcggttagccttttttttttttctgtctgggactagggtgaccccagtctgcgagctgggaacaacgagggattgggagaggaaacgattcgaatcaaagcaaggggtcaggcgatagagataggtctgataggtgtaatcggagacaaagatgaatgggagcactaacaacaaagaactggtggagtttgtattgagggaaagtccacctgtggcaggcgtcgctgccttgggagcaaacataattgctaatatgacaataggtctcgaattctgaaatgagaatggaacctgtcaataggtccctcaataggaacagaccttggaagctgcgcaaatgcgatttgcggaatgcgcgaagcttctcggtactttgtttatccgacccgacctttcccagcttggaaaggctactggtttttatacttcgtttgtatggctttgttcgatacttggaaaatgcatagtaaaattggcatctcattctaaacgacattgatatgtcattcatgtgaccgccgtggacttttgatacaatcaatccatgggtgtctgacttgacctgtccattctcctttcgattctggtcttattcagagctttgccattgaatgagtcactgatcaaatgagctgcatctaaagccttcagcgaaggcagccgtccagtttaagtgacagtatttgtcattatggctgacgcgaatgccaaagagtggacgccagtatgcgtggcatcaacaagacgagaaagtgagagagagttatcagatccgtcacaactctcttcaaattcatcatcaacagtccaaatcgagccagtggcgacctctggtggtgtattcatcgatcaagataccgaattcggctatttcaagagtgcagaatggtcagactctagtaccgtgacccaggatcaacctttactgaacttgtggtgtataggacgccagacggaactactctgctgacagattcagcgaatcattctatcagaacatggatcttgtgagttggcgcatcatccctatattgattatctcactcacacagccaggccgccggatctactggaggacaagcccatgcaccagttatccccatactcaactctactctcagcggaaccgacttatgctaccgcaatctatcccttctacaaccttcaagatccatccactactctattcctctcatctgttcgtgatcatccaattcggctatcatcagccctagctcccatatcagtggcgagctactatctggtaaatccaatgacagaagcattcataactccgcactcaatgatctacccatccctgctgggtgggacccacttcctcacaggctcagatagtctcgtttgtctctttgacgtgtcccgaacgggagcacatggccctgtgacctcaatgccaaccatccccagcaaacgaaagcagattgtcggtggcggtattggcatgaagggcattgtttccgccctggctctaaaccccagtggggacggtatccttgctgcgggtactttcaccagacacgttggattgtacagctcaagtggctcgggtgagctccttgggactttcagcgtggcaaaaaccaacgcaaaccgtgatattgggggtcgtggagttacacagcttgtatggagtccctgtggcagatatctgtatgtcgccgagcgtaagagtgatggcattctggtttatgatgttcgagttacggggcaactgcttggacacttgcgcgggcgcaaggctcttacaaatcaacgcatgaaaattgatgttgttccatctggtcctgatggctctcatgagatttgggctggtggtaccgatgggtttataagggtttggaggagtccagagcactgtgcaggtgggaaggatcccgattgggagttcaaggtgcatgatggtaagtccattgacaatccccaagatgctcattgctaatgtatgacagatgccgtgacgagtacaatgtttcaccctatgggaagtgttgttgcaacctgctctgggcagcaacgtcttgtttcagatgattcctctggcgaatatattccagcggagaatcccgataacagcctcaaggtctggtcaatgccatttctgttgtcagaacccgacacaaaccatgacttagaccccgcggtttgaactgcaaaaagagaaccggtcttactcttacatctccttgctatatgcattccatcggaatccgtacagagaagcatatctagaaaccaaaaagccattaattgaatcactgcgtgaatgtaaattattttctagatagacgctctaccgcgtccatgtaacctgtattgactatgtaccaaatccatgcaatatgtactatgtactgtctcagaaacctcaggtccagtcttcagggaatccgaatgccatacttggcatatgggaagtcttccagggtggaatagagctggccaaacccatcaccaatcttcccaggggttccagaaccctgcaaacgccaggcctggagctcctccacctctttctcggcatctgacttctcatcctccttgtgcgatccggtggctccagcgagaacctcttcctcccggcccttgaactctcctaggagacccgggtgggggcaccaaacaacctgcatgccggcacgacgaccagcctcaacgcccggaaccgcatcctcaaacacgagacactcctccggtttgatctcagtcttccccttgctgcgcagctcactgttgatggtctccagcgcaagcaagtagatatcaggaagcggcttgcctcgacccttgccgatgcgcggatcatcaccaagaaccttgttatgttcagggaagagcgagaacagctctgtcagatgatcggtctttaatttgtagttgaatctgtgcgacgatgttgctagcgcgatgtacacgggctcatcggttgactgcgtcgacacaagattggacaacagagtcggcacaccggggagcggctttgcgcgtgggaagtagtgttcctgaagggctgttcgctcctcgttcagctgctgctcgccgatggggagctgggcaaagtctttgaagatcttgccggcctagatatttcgtaagtataccatacatcacgatatatagtgtgggacgaacctccggctggggtcgaccctgcatctgcgccttgattgaccagggaagcaggggtctgccgtacttttggagaattgcattcgtgactatagtgtataaatcctcggagtcaatcaacaagccgtccatgtcgaagagacatgctcggatgcggggaaggctgtcaaccaagtcaatggatgtataagtgcgaacatgattaattcactcacgcattagtggaagccatggttgtaatggtctgtttaatggtgtcagagtgggatgttgaccacgtttcgataagacgcggggaacaaacgttatcagtatcagtcccgtgattgagcccttggcaacgtctgatattctcgcccgacgacgacctgctcacaaaatgagcagttcttctaatgcgcccgaacgggacgggaaaggtgctcccgatgacgctgatgacagtggtgacgaggatgtcttccacgatgcccactttcccgccgaggaagaagccgtgagtcgtaacggtgttcaagcttatgatcggagccgcatattgacttcaatctttcttgcgatagcaactcctgaaagaagcccacgaaatcaaatccgaggcaaaccagctttttatcgcgacaagctatgaccaagccatctcctgctacgatcgagctctcgcttcctgcccgaactaccttgactacgatgtcgccataatccacagtaatattgctgcttgccatctgaaattggaagattggaaggctgcagtagactccgcaaccatctccattgaacgtctgagtaagattatcccgccgaccccaccggacgagggcaacgagtcgaaggggaaacaaatcccagaatccgaaaagaagcacacagatgcagtagttgaactatccggagatgacgaagaagccgagttgaaggaactacaacgattgcaagagcaggatgagcagcggggcaaggtgatgcgacttcgagccaaggttctcatgagacgtgccaaggcaaagacccaaatcggcggctggggtagtctgcaaggtgccgcagaggactaccaggcagtttctgcaattgagaacctttcagcagatgataaaaggtttgtccaacgggcattgagggaactccccgagcgcatcaatcaggcgcgggagaaggagatgggcgacatgatgggcaagctgaaagatgtgagtacttcttcctggataagatatgtcaaaataatagagcagtactgatctcgggcagcttggcaatggcatcttaagcccattcggtctgtcaacagacaacttcaagttcgtccaggacccgaagactggcggctataacatgaacttccaatcctgatcagctttagtcaatcagagacaatggcatcatctatttgttgtactccgggcacaggagagccctggaattaatttgtttctcggcatcatatgcataactggcaggaagccatgacggcgttctgacttttgcatatcatttatcttatttcaacaatgcatatcttgtaattaaaaaagctacagtcccatgattgtggagcacaggaacatatcatgcccagctatccaccatagtctcctttgaagccactggcttggatacgaacagttcttgccgtcatacacaaaatatgctggtctcaaaagggtctgtatttattgaccagccgggactgaattctttcaccgaaaatatgacaaatttcctctcgtttgtatacattcaggaatcatgagacatgcctagcaaggtctttgaaaatataatcatagaagtgtggttgtctttgacctcaggcgagactaaaaatatatcttgtcaagccgcatgatgaaactcccaactcatttagtcttaaaaccccagctttcgcacctgaatatactaaacaacacaacctcataaatcaccaaccatggctctcaaagtcttcaccactgaatccattggtgcgcagagaaaccacattgccatctacatcgaaaccgatccaagcgaagacagaggctggctgcaccatgtcaccggaacaatcctgaacggcatggattacacacccaggccaacccctaacccggaggtgctaccagaacatgtgccagactcaaagaaggagattggaactatcgaggaggctgatctagagaggttccgggaggaatgctgtctagcagttcctcccccgcgggcccaggtgacgctcaagggaacgcgactgtatcccgacaccccgctctaccgctgtggagattggctgaaagatgtcgaggagatggctttcaggaaggggatccttaagtccctgtgatgggttagttattttgtttcatggccttctgagaaagagtatgatactaagacaacgagcagtctgcggttccatacacgccatatcagagttaggactcctatgttggtatctagatagtattgaaacgaattattcttgtctgcagttttctgtcttgtgcgaccgttgttcaagacattatatagatggggaaaatagtggatagctataactatagggaagatcggaataatctgattctttgagctacacaacttgtctaggagatgtttcttgtcagaaaacagcttcattctcttacagttctcctttcagctgtctctaatcttgtagcagaattgttgctcccgagacctcgacgtatgtctcaaaacaatgccttctcgcatatagaccggttgcttatcttgccacttccgagcactctatcccatcatcttgtctgagaaccatcatctctcaggctataagctatatcagtccaaaaagtcccaccaatcatctccccggcatacaacttctactttgaaaaagtccatccaacaagatcaaagacatccacaactgtccaccatgccattcaacgtctatatcacccgacaagatggacgctgggattgggtattctatattgagcttgatgcaatccccaaggaagtgatagtggagagtactgggtggacacactccttcaagagcgacgggaaagacgggaatcaatacacagctcgactcaatcgcacccccagggtcaactctgcaggaaacatgatcgcaactatcgaggaagcagacttgccgaaattccatgaattatgctttacagcgattcgtccactgccgcagaaaaagcatatgaaccgtctggtccttcgctgcatgatgccagggcgatggaagcaagagccaagggagtggtggctgttgattcgggacagcgcttttgcaaaggggatattcaagcctcttgacattgagatatcagccagtcctaactgcctgtgaggacgctggggtgtggatagacaatctcttcggttggatatggactagaagtcatcaactagcgcatcttcgtcagtacctcacaattacaaatatttcatcccttggtaaactccattgtaaccctcgaccttctcactcatctggtggaacacaaactgcgccagacgcgcagcaggatacagccgcaaccctgtgggattgaggacctgcatcaatgccccgacagccccttcgtatccactgtccataacgccggcatgtatagtcactccggacctaaataatgagctgcgcacgaaaatctggcccatcacatccaaaggaacggagacagtctcgttgaattccacaaggtaggaaccctgcgcgagatctaaatatggatttgtattttccttcgaggagggaaagggtatctcttcagtcgaggccggctgtcggagtttgttatccaagtcgattaccccgggtgaggtccatttgagaacgcgcttcagtgtgaggtctacaccgcagggttgggcctgtagtgtgggatatttgacattgcgaatgatggagcgggtaatgatagagtgcccaggaaggatcatgtttaaagtgtcagagtctggtctcggttggtcctctgtgatctttgcctctgtactcggtacatgttggagaagtctgccaatgttctggaacagggacaagacaaacagagcaaacaacaaaccaagcaaacagtcttatagccgtcctacgatgtacagcatacggtacaacatacgtcaactggttatttcgcaggtacatacatatgtacctccaggcctaggtactatctgatattatcgaaccgaggaagccaaagggccgacagagaccttggaaaccccgtgagtttaaatctcgtccaatcagagcacaatgcggggacataacaccgggccgacccagcgcgtatggagccctcaatgccgagttcaacttccgaaggtatttgtatacttctatttaacctatttggacggagtttctatctctttggaatcaacttcggtgcaatttatacaaaatgccatcaatttaccgttccccatacccagatctggatatcaaatcagttgatttggtctcctatctgttctccaatcctttcaacacgcccttggaccggcctatatacatcaatgctgtctcaggagagcaatatactctcggagatgtgatgcaacgtacacgctctctgtccaacgggcttcggcaaagtataggggtaaagcccaacgacgtcgtggcattattcagtcccaacaccatcgactaccctgtggtatgccatgcaattgtaggctccagggctatcgttgccccgaccagtgcggctttgacagcactagagcttaacgctcagctcaagaccagcggggccaggttcatcatcgtccattcgtctttgttggagactgctcaaaccgcagccaaggggacatctgtcgagaagattgtcttgatagatgaccaaacacgggccaatggccaacctacatgcaatcatctcgctagtacatttgcgcccggtgattttctcgctatcgatccagccgaggcagatcgccaacccacattcatctgcttttcatctggaacatcaggcgcagccaagggtgtcattacaacacaccagaacatcacctcgaacctccagcaatggcgctaccaaatgctagactccggtcttcccgcccagcgaccagcaagacaatccgccattgcattcctaccattcagccatatctacggcttgaatctgttcatgtgccagtgtttgatatggggcacaacagtggtcatcatgcccaagttcgacctcgatctatacctcagttgcatccagaagtaccgaccagacgagttgacagtagtgccacccattgccctgctgttggtcaaagacccaagggtctccaactacgatctaagcagcgtgcgcaagatcatgtctgccgccgcaccgcttacaatcgaattatcgtccgccctcgaagccaagttcgcggagatttccaagacagaggtattctgcacccagtcatggggtctgacagagacctcgccaatggcgacagccgtcccgaatgaccgcatggataagcgaaacacgggcgtgggctgtattgtgccgaacatgcagctccgctttgtggatcccgagacgatgaaagacgcagccgtcacatctgacgggtccacggcacccgcggagatctggtgccggggtccgaacgtggtgatgggctactacaacaacgacgaagcgacgaaagaagcattccacgtggacgagaatgggacgaggtggttccgcacgggtgatatcggcactatcgatcgagatggctatgtcagtatccaggatcgcatcaaggagatgatcaagtacaaggggctgcaggtcatccctagcgagttggagggaaagctggtcgatcaccctgacgtggaggatgcggccgtgactggaatatgggtggatgacagggccactgagctaccggtcggctttgtggttttgagtcgccatgttaaagacatggatcgggagactgtccttgatgggatacacgcgtggttgaatgagcgcattgccaaccataagcgtctccgtggggggatctatgtcttgtcgcaaattcccaagtcgcccagtggaaagattctgcggagacagttgagggattggctgaagatccaagggcctaaagctcgtctgtgattgaatacttgggacaagcatctatgccaatggcgtggtaaccgtatagatcgaagtagtaattccaaccgttcaattagaaactccggcttatttctgcgtattccaaatattgtgtcacttgacagacatacatgctacgtagatacatctatcataattaaaatccaattccaagcaaattgaatgtccaaaatatccaaaacgctaaaacgtcaaacttcgggagatttccagtctcggggcccgcgggttccgatcggaggtcatttacggacttcgacttttgagactcagacccttgttttaacttgtcattctgtcagatggaattgatcacattaaattaagctcattgcacattccacatagcttctcacattctttccttaccttggtttcggacaagggctagtcctttttcacctgcgaggtcggtacccgcattgtgattcctactctcaattacacatatacttgtcatggggttcttgacgtggcccttctcacatgagaaggaggaaaagagacccaagttcgtcgagctaaggtcgtcaaaatggtttattatgttcgtcgtggcctttgctaccgggacggacatcttcatgtacggtcttatcgtaccggtcacgccaacagcattgaaagacaaagtgggaatctcagaggatgatgtccaaagctggacatccattctccttgccctgtactcggctgctttgttagcctttgcccctgttgtcgggtacattgctgaccgagccgagtcccgtcgatggcctttgctgtttggtctcgttgcgttggccgctgcaacagccttactgtgtgtcggtaccaatatcgcgttgtggattgttggtcgcttgtttcaaggcgctgccgctgcggtggtatggacggccggcctggcactgatagtagacactatcggaaaagacgaccttggccaagccattggctatgtctccatggctatcagcatcggaacgctagctggacctcttctcggtggcgttgtctacgagaatggtggttattatgccgttttcggtcttgctttcggtttcatcgccctcgatatcatcttacgattgctgttgatcgagaaaagacatgctattaaatggcttgcgccggagatgacaccgctgtccgtgacggagaagaagtcaggggaagttttagaacatcccgtcttgccaaccaatggctctgaatcccgtgaatcacaaccgccttctcccccctcacggagcgcgttcggacgtgtcgctattttgttgagctcaccccgtctcgtcgtatccgtctggggatactttatcttgtcaatcgtcctgacctcattcgacagtgtccttccactcttcgtgcaagagacattcaagtggcagcaaagtggccagggactaatcttcatctcgctcatggtgccgcacgtcttagacccactgatggggtttgttattgacaagtaccccaaatcctgtcgctacctcgctgcaggcgcatttctcaccgtcgttcccgttctggtgcttctgcgttttgtcaaggacaactcgatgcagcacaagattctattgtgtgccctcctcgcttgtgttggggtatgctttgcggtggctatgccacctctcattgtggaggtgttcttcgctgtgaaggagaaggaagataaaactcctgatatcttcggtcgcggtggcgctatggctctggcttttgggctgtcgaatatggggttcgcgaccgggagtctgatcggcccattctttgcgggttatattcgccaggaagctggctggggtgcgatgggttgggcattggggttgatagtgggcgtatcatctctcccaatcctgttgttcgtgggtggctggatcttgaaaaagccgctcgagtcagacactgaaggccagttgatggacagcgcccctgtcccataagttggcacagccaaacaaatatatttaccctgtatatatacttaatagaagactccggcagtcgttatccgcctatcaccatcatagaccttccccagtcaaacgtatcgtatctcttgagtaaccagaaagacaggtagtttagaattgagcgagtacagcatatccgagggaagagcgccaatgtaatggagggttgcacaacaactataaactgtagccaacgtgcatctagaaatatatatcatgattgtactaggctacactatcattagactcacgtataggaaacgacgaagaattgtaggcctctcacatgggtttatgcaatatctcaggtacaatatgacatacagattagagtacctgtaccatgacgttgcttctcgtaagttgattaaacttccatcccccaactggctgcgattcacattgaccatttgtatgcaatcatcttccaaagttacggagattcctacatactctagtgtaatttcagcttcttggtgtttaaattattaccactaaatcaaaaggtgattactatagcggtgatatacttccacgtctatataaggttctgaggtacgggattatgcggctctgtttccagggttcacctgagcatatgacttccacgtacaacaagaaaacatacacactataaccagagccgtctcagagccgataatggatattgtcttcgagggctttgactatttgttcgtattcctcacaaggttcgaaccccttcaatgtgatcggtggtcggcgtttcggcgtccgtccaggtgagttcggggagcgagggaccccgacaccgactgattcaatttatgtatggtgttaaaattgtctggagacgagggaatcataggtttgtcgtgtcaaatagagtttgatctgcgaagtctgagcatcttgttgacatggaaattagaggtactagcgactgagctaggatataagactcggcgagcgtctgtacatcgtgtgttgtactgactacattcaccccttcgattgttccattctttacattctacatcgaagcaaggggatatatcaagcataaagttcgtgctgcaaccctttgccctacaaccaattgtaccaaacccctagaaaatgggaggaccctatatgcctcgaacggcctccatgggaggtcgaccaacaattcccctcgatgtcccaatatgcgccgtcttcctcgctcttttcatcatcggcgccgcctgccatatgaccctgttccgtcgcaacctcgcaagggaccacaaattcattccatcgggcgcaacattcggtttctgcatgtcgcgtattatcgcaaacatccttcgcatcgcctgggcctgtcacccgacgaacattagacttgcgattgcagcacagatcttcgttgctgccggcgtgttgctgcttttcatcttgaacttgctatacgcacagcgtatgttccgagccgtctacccagtcctcggatggtcccgaccagtatcttgggcgttcaaagcactgtatgctctcgtcgtagtaacgatcatcatggtcatcacttgtgttattcagagttcgtatactctcaactcgaacacccttcgtatcgatcgtgatatccagctctatggccagacatacttcgccatcatctcgttcctaccgcttccgcttgtcgcacttgtccttctgtctccgaatagaaagtatattgaacaggttggctatggtagctggatcgccaaagtcttcatcgtcggacttgtcggctcattgctctgccttggagcatcatttcgtgccgggacctcttggatgccacctcgtcctgtcacggacccagcctggtatcacagtagggcctgcttctatatctttaacttcactattgatattctagtcgtggccattttcttcgtcgttcgtgttgaccggcgattctgggttccaaatgggagctcggaagtgcgtcactacagacgtggtgagaataacgcgcaagtcgcacaagaggggactgctcttacggttcacgacaaacaggatatcgagacgcagagtaggtagcagcatatctcagggcctgacatgtgacatttgtgattaaggaaggtgcgatggagggtgtcgcactttaggaaggcaccgtttgtttggggtataaaagggcccctccccccatttctcttcttctcttcttcttctctcctccacatctctctagccaccatctcaccgtagcccccacgagacagcgtcggcagaggatgccgtagcacatgctgcttcatctaccacagggaccatgacattaccatatgcacgaggtccatgtaggtctgcatcaaacatcaaactgggctttctcgtggacgttcctgaagtcgtggctctcattaccacttgacgagtcccacggaatacattaggggtgtaaatcttcgtagccgagactcgaaggtagtcacggcaatgaccgacgcttccaaccttacggtttcttttttgtgtatctaacagaccgacgatgaaggttgtaccattctccattgtttccccatgccactaccccagttgcactacccgtcgtcgcgccgtcgctcagctcggcgttactgttcttcccaacaccgacgtcgcccagtctacgaattagatagactgtgacgccgaatagacagaatagcctattgtttacatgtattatctgatcaatgcttaatcgtcaggatgactgaccatgatgcatactgtcatgtgttcgtgagctgaaagagcagctttcggtgttgacatggcactcattcaaggcgcggaagatgcacacattcttctccagctattggccttagatcgtcagaactttgaactttccctcattatcctatatgactagtgctttgttaccttacccaagaaggtctacacacggccgtttgaggtcgccatggtttcaatgcgtttctgatactcgatgttctcggatgccactttttgttcatggcagaagaagctgggcccaagcagataacaagcaatgatgacaagccttgcactggcacagataaaacgtaatctccatgcagcttctaacacttgtaagtcatctactgccatccagagaggaatattgaattccagccttctatgcgtatctgagctcctaatctgttaccacctgggcagagaaaggtatttaataatctggaatagcctcccaaggttatttctatagtcttatgggcctgggtcttacaaatggtcttttattttcatgattggtatcaacaagtggccaggcatcaaaccatacagaattaaataggcgagagccatgttcgattgcaacctccattctccgccagtccaattgcctctcgcaggacaaagatgaagtctatcaaaggaaatagtcaggtgtgcgcctcgataccataggttctcccgctcgggggcaggggtcgaattgtaggctagataatgtcagtgggatatccaaatgagaaattgcaggagtgcgcacaatgtgtatttcaaatgctcgtcaatctccataatggcggcctggttgccgcagcggtaacagtaatttggtgctgtggtctggttagtgcttttggtccatcaagtcttgcgaataagaatatacctgagaaaatagtgacgacgttccgatcctgtgaccagttatatccttccatcaccaattgatgggcacgtgccacaagagtcaagccattgttgtggttgaatgcctcggaaatgtcctgtccgaatgtgtatccagcaccacggggagagattccccatccgcatcggtcatcaggatcactccagagcaaatcacacatgggaccctcgtggggaacttcttggatgcgatcaagcgaccggatgttgtcgagagtgtcaatggatggactcagtccaccgtgaagacagaaaatctggttttcgatgagagcagtaaggggaaggtagtcgaaaaggtcggtgaagtatttccacacgttggcattgccgtatttgcggagacattcgtcatagaatccgtagacctgtgtgatctgtcgggactcgtggtttccacgaagaatcgtaatacgctgcgggtaacggatcttcagggagaccaggagggtcactgtctcaactgagtagtaaccacggtcgacgtagtcacctatatcaagaaagattaaaaaacattaccccacaacgcgttgacccgaccgttatccactcacccatgaagaggtagtttgtatccggattaggaccgccaatgcggaaaagctccattaagtcatggaactgtccgtgtatgtcaccgcagactgtcactgggcatttctattcggatatatgtcagtgggctgggcgatcaggacaacctcccgaccgagaacaacataccactggctgcacattggattcctcctgcaatacctctcttgcctggacgacacatatgatcaacttgaattcatcattaccactctgtcaaaacaagggacccacccgatcgcacagccgccgcacgtcttcttctgctaattgcttgcaagtcatcaaactctcgatccagccgtccaaagtcggtatggacccagggtcgcttgttggcgacaagtggtgtggctcgggggaccgcgcagtatcgatttccatgttgttatccattgcgtcggtgtgctcaactggttgaaaaggaggggccagctggggaggggcggtctcgtgagaaaacaacgggattcgtgggtaggcgcaggtatcgtggggtctggaaaagatgtgggataattacgctccagatggaaattcaattaaaaggcaaattcccagtattgattcaagggataaggggatgggacttgggaacacgagaaagggagaagagatgagagttcgggaaggtcaagttgagtggtgaacagatgcgccacacttcagccacacaccgctttctccagcctacgtaattatcaactacaccgttgtacagaacgactagggggtttatatctttgttgatttgtgttagacatttaagaagacaatccaatgggtgtataagaagatgtcccacacaatccactcagaagctacggaggaaagacgtcgagtgggccatggagacatggctgtagcttcgtgttattcttgttaatgttgagatggatatatgccatttcggaacaaaggatcttctactttgttaaagtcatcactcactcgtcactttttagataatgtcaccaccaaatccaccaccaaacccaccaaacccaccaaatccacccccgcctcgtccattactaccgaacggtcctcgattacgaccaacaggtggttcaccaggtcctacgggatcatatcttgcacctggaggtacacgggggtcatatccatcattaccagctcctcccccgttgaagagagggtcatcaaaggtaggatgcatacccccgccacctggaccaaagccagggcccataggtccgcgcaaaggatcattaggaccaagtcctggtgggtagagatctcgttctccaatgttgtacgggcttctgccttcaagtcgtcctggatatcctcgtagaggcctattgatctcaagctcatcttcgaacccgggtggagcaaagtctggtgggttggagcggcgaggagctgccgccaagggatcatcaaatgggcgtgggcgagcaggctgtggcagggagccatctcgaagaatatccggttgtctttcttcttgtggtcttgctctggataactggcttggatcttcatacccctctttgtacaaaccgggcgcgagtttctggatgacgttgatcttgaataaaccgaccaggtcgcctagtcgagctggggagatgaaaacatctcgcagagacgcagtgagattgtctgaggaggatatagggagcgcagaggtggagatgtagtctttgatggggatgtcgaacgagctggtccggtcatcgcccaatgccaatgcgaagatcactgcgttatttcccagccgactcactttgagtaaatactgcattgaagactgcgcatgtgcgtaccgaaaggcaaatgtatcgttagtgttccattctgcggggagggaaggtgtatctgtagatgtttctagagaagttaataggagatcaccgatgcgatcggagacagacttgacatacctaaagtgtgctcttcaccaagaccgatcaatctgaaatcaactgctaccatgcatgcatggccgatcagagccacggcctcatatgatgttttgagactcggctgtctatcccccgcggactggatagctctcacggcaagatcgaggatattatcctgacgaagggcatcggctggagccatgtttgatagatattgtatattttagacgtccaatactagatggcaaagaacctggaataatgtaggagatggggcggctcgtgaatgcccaaagtgacctcacatggggctagctgccttgggggagctgtggcgtcggaacaaacatcccccgctccagctatcttccccgcttgcctgttctatttgtggccaagcggagagctgcatacgaaacatacaaccactgttattctctgaaggtaatgatttgattgatatttcccctctataacatcgacttcgggaaattcttcattgcctgccgcactcccaaatccgccaaaatctcctcagttccacccaagatggcatcaaacttgtatgtgcgatggaacatctcaatgaccttgcccattcctgactgagtgataccacgaccaccaaagatgtttgtagcgagactggcaatttcgcctgcggcttgggtacagtgtgatttgagcagtccgataggtccacccagattctttgcttgttcggcgtatgtcatgttgcacatttgataggcgatggattcaagccatgcctggttagattcggctagggagatcatgcgggcgagcctgtcgggagttagaagagggatattaagagcagattgtaagaaactcacttctgacgaataactggctgttcaatcaacttcttaccaaagacgatgcgttgattggaccatttcattgtttcttcgacaaccaccattgacatgcggaccacggcagctaccatcataaagcgctcgtggttgaagttgctcatgataacgaggaaacctttgtgctcctcacccaggaggttctgaaccggaaccttgacattctcatattgcacgaaagcagtaccagcggcagtcgaatatgaggtcttgatttgctttgtctccacaccttcgccgcgaggaatcaagagcacggagaatcccttctcggtacggcaggcagtgacaaagtagtcggcgaacataccgtttgtaatccatttcctagacattgtcagcgcaaatccaattaaacaacaaacgtgatccgactgactttgttccgttgacaatataatgtttcccatcaggagtcttctctgcagtcgtcttcagacccgccacgtcgctaccagcaaaggcctccgtgacagccaaacacatctttttctggccggacaagacctcgccattgatgcgctccttgagtacaggatcgtgcagccattgctggacagctgtcaaactaatagccatgcctgccatatttccatcctggaagcctctcgcattggcacggaccaactcctgtgttacaatcatatcgtggagataatcaaactcctttccatccacaactccaccgagcaaggtgcggccatgcagatgctttccagggcccagtcgcatagccagaaggttcgtctcggccatgcgattgatgagctcctggctgatgtaggtgccatcccgctccttctcttgcgcttctggcgttacatatttatctgtgaactcccggacggccttttgcaagcgtcggtggctttccttgtagtatggggacttgaactggggtcgcagccacaggggttctgcgtagggcacggggctcaaacctccagggacgggcacgatgacctcgggcttttcgccttcgatgacaccaatgcaaagctggtcacggtatttctccagcacctcctggcggtgcagattgtagaaatcggatgttgcgtcctggccagcaatctgagcaagtacaacagcaccaccgggatgggcgtcgacaaaatcggttagatcatagacttggtggtcgatgatacaccagagggaatcctcggtgttgtgcttcgcgacttccgcgcgcgtcagggtttctgatgacatgttttagtctggggatctggagaaaggggagaagaatggggggcaccagtagtaaatacccccagattatgagtcgccaatcatgcaactgcagtttcaatttgagccgaggcccgaaaatataatgtggaacctttggctgcaacctcaacaccgaccaacgaggacctcggaacaggactggcccaccatacaacgtataattgatgttttggccaatagcgggctgttaaattataatcgccaagagtgtctatatcgttttacgacccacccgtgatcggcacgtgtcagtttgagcttcaactagctctagagagaaggggcagtacagcatgagatttatattgtttcggatatggggttcaaaagagtagacttctttctatgtacttatgtagaggctatggtgacattggtctttgtttctaagatctatctcaaatcgacagtagtgtattcatgggcacatcttgacaaatggtatctttaaacgccgtcaatgatcccccttcgaacgattattcttgagatctttcatcgcctgctccattaaccacgcgcaaacaggctgcgcatcgcttccgacccgccaactgcctagcacaacgtcgtgctgttcaagcacttcgcttgcgcgagcccaacgacgtcgccaaagctcctcgcgcttatttggcaggggcgcaggcggcacacccgttccattcggccctggtctccctgattggttggatggagactttgcggatcctgagaagttgagtcggtcgcttgcatattggaacccttggtatgcagcctgggcggctgccgctgggtatgattgaatgccagtcgcaggagccgcaggacgagccggcgtacttagtgctgttgatgcaattgatggggttgatggggttgatgcacccggatctaaactggttgttgaagacccggtgttcgtgcgacgcggaggaggcggtggtggcttgacgcgtgcaggttgcgattgactctgggtacctacagaattatcatcaaggcttttgagtccggaagaaggaagttcattcgttgatgtcccagcgctactctcagagtttgaaggcgagggatccaggtcaatcaatgagcctgtctttggcactgcacgtctgggtggcgtagggggaactggtctgcgcttgggaacctcttgtgctggtgtcgacatcgtgtcattttctggcacatcggaaggtgtagcgacgttgcgcagagaggatggtctggaacccttcgccaaatcagctggtgtagaaaccatgcgcaatgcagacggtttgatcggtttcgctgggcgtggccgtgaagtggcggggcgggtaagnnnnnnnnnnnnnnnnnnnnnnnnnnnnnnnnnnnnnnnnnnnnnnnnnnnnnnnnnnnnnnnnnnnnnnnnnnnnnnnnnnnnnnnnnnnnnnnnnnnnnnnnnnnnnnnnnnnnnnnnnnnnnnnnnnnnnnnnnnnnnnnnnnnnnnnnnnnnnnnnnnnnnnnnnnnnnnnngggggggggggggggggggggggcgggcccccgccccggcggtggttgatcgtctatgatgagatctgtgagatcaatcaggtcctcaaggtcaagatcttttggatctgtatcatgatgggctacgggcactgcagggtcagccgtgccacctcgaggcgggagcgctggtctgttggaagcggcatccgagtggtccactacaggtggtgaactgcgactgcgcttagacgggtcaagatgggggacggatttgtcgaagaacttctgcgtttctggagtcgtaacatcacgaatgaagacacccaggatctggccaggatatgccaagacaatctccgtgtaaacctccagatcagcttcaccactgtcaccaacaagaatgaattttcgttctgggaagtcgcgcagaatttgttccaatgatccccgtttcctctccgctgtgggctcaaagattccttgaagcatacccgaatactgtttgagatggaaggagcccggaggcaatccgaccatcttgaagtaccgctccaggaggggatacaattgccagggagcattcgacacatagtgaatttgcacgccctcactggccagtttgcaataccagtcgctaactccgtcgattttaagttcattcaattcacggacgaaggtgttgcggaacatctctttcgctccactggaaatggccgagtgcttaacggtatcatcaatgtcactgatcaaactgattccaaccggatcaatgacatcaatcggtcttgcgacagacaggtcctcagatgccaacacacgaatatgagttggcgcaaagggcagtgtagcgcgaagagtaaaatggcctgattcatccgtcatgatatttcgagacttgctttcggtgtcgttgaagaagaacactgtcaccggcatgctcccaacgggattcgacaagaatggacgaagtctttccattagatgggcatttgctatagataattcatccttactcaatggtgcagtgggtcggcgtgtttgttccacattcgagcctttccaagccgggtctgcttctctctcggccttggcgactagcgattgaatctccttgtcgatgtattcgtcatctcccttcccagaaatcttgtcgttactttcattatttgcagttccagacggtgcagagatcccgctcagcttcctagccagggcaatcattaatcggtgctttcggctcatctgccctcgactaggagagtaaatccagccacgcacgtcaacggccacaactgcctcttcattctccgttggatcccaagtaggcgaggagagatcgtcgtcctcgtgggttgcaccccggtaatcatcgatagtttctgaccacgactcacgtcgcggacgtgtgttggtaccggtgctcgtgctcttcttcttctctggcaatcgcctagcataactggggaataccaccatctcctcatcgcctgaccgtgaaatctgtacgtccgggaatgcaccgggtgtatcgtagtagtcctcatcgtattcactcctctgcccggaccattgtgcggtataggtctggcgtagctcatttgccgctttgagatatccgtagaccttcttccgacggctaccgggggcaccagcaccatcaccaccccctggcgcccatgttgatgaaagtccagactgcgacatcgggtctatcgttgtgtccttcggtccgtagcggggttctcggatcgacttcgggtatcttgcagctaggctgctactagctactgtagtaggtttcgatagccttgactgtcgttgggtcccgagaagataattcacaagacgtgcgccaaatttgctatcgcgtgtggcgagtcgcgcttgtcgctgaaggatcgctcggtagattcgcgattgggcccggtgtcggagcgcgggcagggtttcgtaccggatgccccagagacgggattgagtgcgtctggttgcgcgtgcaccaattatcagatcaagtatatgcgaaagtctgctgggtctaggttcgcgggggaaggaacgaaagaggctggtaggtggacgtctaaagagagagggcctcgaccgcaagattggccaacggaaacgtgatttaggcgccagggtcccgggtggtatgatgtacaagcagggtaaagtattccgcgacacaaaaagccaagtcgagtaaggctgtagaaagttgattacctgcggggaagagatcggccatgacgatgactactcgggtgcgctcaccgcgttgcaaccgaagattccagtttgatatttgagactcttgttcttttgtgttgaaataactacatttagacataatcatctaatatttaagattctatccatacatccacaggtatttgaaaggaagcagatacgggaattttgcattgatgaaatgtatcctgatttataatctagccatgaaacctctcgctgtttcagatatagtgagaaaaatcgtatattgtacactaatatatgagaactacctaggtatcaagtgccagttatgcactgtcctcggcgtagttcaccttctttgcacgtgaacttcgagaaggtatcgaacgagcactgtccagttccaccgaaacctccccagtttcttcggactctggggtagactcagtcaacgaagctctgcgtttgcgagacctgctcggccgaggtgtgcgtttcgtctccctgaccggttttttgactggcgtttctatcttgacgggtatatctaggggagcatcgtctgtgacagactcattcttaccctttttggcggcgctttttttaggacttggtgcagccttaggcttcacgattttcttcgccggtcggagccattcttccatgccctcaggccaatagaccctgccatccggcccacccatcccgacttcttcgtctgggatggcgcgaggcggtggtattgagccttgtaggtccacgaatgccccgttcttcttggaatttttgggtggtttgaatggttggttttcgtcaaggcgtatgaagggtattatttcgttcacaagatcgtagccggggagtttgaagtttctcatcaactcaaatacggcttgttctttgtccttggcctcaatcatcaggtccatggtaggcgcacaaggaggtaaagtagtaacgcgggcactgtgtttgcgtcgttggcgccgagtgatggcgggtgaagtttgttcggaatagtgcatcttttgagtgatattcttccgagaccatgttgctgatatacgctcatagaggggtatgatatcctcggttccctctcggagctcattggcgtcaaaaatgatattatggtggtggtagtcgaggacaagagggatattgagctcctcgcaaataggcagtagatcgtgaacggaccagctcacgtcgtcattctccagaactaatcgattcttgatgtcttgcgacaacatagcgtagttctctcggaaccgatccagtgtagcagccttatcaccaaacactccacccatatgaaggatcatgactgcatcgcggtcctgctgtggaggaagtttgagtagccggagcatttccgagtgatactcgagatcgcgaacggaattctcgatgacttcttttctcggtgatccaaattgagtaaattggccagggtgaaccgaaacccggtgtccaagttctccaaccacacgtcctacttctgccagcacctccgaggcgaatggcgccagcttataaccatattccttatgactggcaaatgggaacatctcactgctgagtcgcatgaacttaatgccatacttgtcgttccaacggatgattttgaccaaatcgcgtgcattcgccaggcctagcccctcaacgaaagcttgtccgcgtgcaacatcggctggctgatcgcgatctgggcgatttttggtcgggtgtgtgggctggtcgggatcttggagcgggtgtcgattttcgattatagaggcgattcgacatgttcgagaacagaatacggacggtgttgaatagcgaaggtacgtatttagacaagcctgtgcaagtcagaacccataatcgtcagcgcgagtgtatcgtgcccagcacagcaaaactcacatatcctaatcgacctttccatggcaggggaaggtagctgctgttcaccggaggtggtcggccgagtgcctcttttagctcttccgcatcaacggggacatcttcgtctgattctgggtccaatgaagcctctacctgaccagcaggtaatggtatatctccattgaggatatccgcaggcttcatctccggcccaggcgtctcagttgccccgaccatatcttctggatccagatagcttggttgtcggccaagatcctgtgaatacgcacgcgatgatgcgagcctcgacgtgtttaagggatgcgcaacacttttaaatgagaaatacgagaagcgcagggcacagtgggctgcatgatgggcattatgaattggggcgagcgatctggttctcgccacaggaacagggattctcaatgacgtatgtcgaccctgttggctagcttccaagggatgaacacggatagacagaccctgcagcagccgaggaaaagaccgacacattcagcggacttttggaagtagctcaaggagtgttggggtttgaaggaggtcgtaagggcgggatgttccatgacgcgccaatccacgcgactcaccgcaccaattcacccaacctcatcaaccttgaaaccacaatttgacatgatcatatctgcaatttcgaggcctggaaattgtctgcaatctacgtgataatatacaatagtgcatgaacccattgatgcctcaggcctcatacgtcagcgcacctgtcaggcaaaagtacccgacgcacgaaccgcctcaactgcagaaagcgggacaactagccgaagaaacaatgcctagtggctgcacatgtgctctgctactatttatattggacacatcacaatgccattgtctgtgaaaccttgattgtataacagtccgttagcctgcaggggctatgtttgcagtacgttgtacagcaggcgcaaggattgctgcttttgatatatttccgccatactatatctacaatgtccttggtaaggagcccttccatacccgattgatttgtaggatgtcggcatctgttaactcggaccacccattaggatcctttcggtgctactaaatttaaagatacagatcatttcctcaaaaggatacacagacatggctgggccgtgttctgaaaattggcgtaggtctacatgtgggaaatattattcaactgatgtaggagagcagaggctagagacgaataggctcagacccttcgagcaaattagcctcagacaatgcgcggctcgaaccgaagttgatttcattcccaagcccaaagatgagaatgaagacaatttatgtcacggcatatgcttatcagccaacgtctatgggtacatacgtatgtaggatgatatgtacgtactttatgccggatgatcaaggtatgtgcatagacaatgaagttctatgttgggtttgccgcataactgttccggtgctagatccaatgagaccttatgggtaccaatcagcgtgaactctatgacaatagtctgcatatgtgggtatactaaatgagtacgggggagctgataggggaattctccgggatataacaacgcagcaagttgcacggtggtatgattggagctagggccaagacgaggtggggttaagatgggtactgacagttatttcgaacttttgtacggactaactcgtattaacctttagttataatcgcctgttgttcgcaatcatgttctttccttaatcttccgaggccaaagctcttttttacctcacagaagaactattgccgcaatgattctcaaggttgttgaaccgaaaccggttcccccagagccaatcgctatatgtggaatgtctgtacgtctccctggaggcctacacacaccccaacagctatgggacttcctggttgccaaaggagatgcccgtggccaagtgccgaagtccagatataatgtctccacatactactccgagacccagaaaccgggcagcgtcaagaccgagtatggatacttcctggatgaaagcattgacattgcttctgtggatacatccttcttcacaatgggcaagttggaggtggagcgcatggatccacagcaacggcagatgctggaagttgccagggagtgtatggaagatgccggcgaaaccaactggaaaggacgaccgattgggtgctacatgggtagctttggtgaagactggcttgaaatctgtgtcaaagaaacccaacaatacggccagcatcgagtgagcggatatggagacttcatgctgcctaaccgagtctcatatgagatggacctgacggggccgaggttagttgttccatatttttttttatcttggaatagaatgcaattgctaagtggaaaaaaataataaagcatggtcgtacgtactggctgctcagcaggtattgttgcactgcatgaagcatgtctggcaatttccaggggcgattgcgagagcgctatagttggcggtgcgaatttgataatggcaccaggcatgacagctgccatgagtgagcaaggcgtaatttcaccggatgggtcttgcaagagcttctctgccgatgccaatggttatgcgcgaggagagggaatctctgctatcttcatcaagcccctggctgatgccctccgggatggaaatccagttcgagcggttatccgttcgacatcatccaacagtgacggaaggggtgctggaatcggcgcacatgttcccaacgatgtttcgcacgaggccatgatcaggcgtgcatatgaggtggcaggtattacagattactcccagaccgcatttttcgagtgtcatggtactggcacccaagttggagatcccatcgaaacccgagcagtgggtcgggtttttggtccttctggtggtatcctcattgggtctgtcaaacccaatcttggtcacgctgaaggagcttcgggaattacatccctgatcaagtcggtactagccctggaaaatcggaccattcctccaaatatcaagtttaaggagcgcaaccccaacatccagtgggatgaatatgggctcgctgttcccacagacccgatgccatggcctgaggccaggagcgagcgaattagtgtgaactcttttggaattggaggtaccaacgctcacgttattgtcgattcagctcggagctttggtgtctcccccgttgccacacggcataccatttcgccccagctgcttgtttattccgcaaacaatgccgagtcactaaaacaaatgatttcccactacacatcctatgttcagaagaacccagccagagttgccgatctggcgttcactctagctaataaaagggagcatctgcctcatcgggcattctctgtgcaaagcccattgggtccgctcacgacttcggcaccctcgaaaactggggagacaccaaatatcgtcatggttttcacgggccagggcgctcagtggccacaaatgggtgcctctatgatccacaacgacgtctatcccgcatttaagaagagcattcaaaatcttgactcacatttgcaaaccctcacagatgctccagactggagcattgaagaagagctcttgaaggaccccgataccagcagactcagctcgtctgaattatcccagcctctctgtacagcaatccaggtggctctgatcgatacttttgcttccgttggagttcaacctgctgctgtcgtgggtcattccagcggcgaaatagctgctgcatacgctgccggtgctatcacagccaccgaagcaatcacgattgcattctatcgaggtcaggtcaccaaggcgcaaaccaggcctgggtccatggcagctataggcatgggagctgaggacatccaggaatatctacaggacggtgtcgttgttgcttgcgaaaactcacctaagagtgttaccctcgctggtgatacacatgctattgaaaaggtagttgccatcattaaggaggcccatcctgatgtcctggctagacagttgaaagtcgacaaggcgtaccactctcatcatatggctgagataggtgacgagtaccatgctttgattgaacatgaaatatccaccaaggctccaaataagttattcttcagcagtgtcgagaacgaactactcacggaagcccaacatctcggccctaaatactggcagatgaaccttcagtctccggtcctcttccgctcggctgtatcgtctataattaagcaccagatttcgaagaatatggtgctgcttgaagttggaccgcactccgctcttgcgggccccttgcgacagatccagagtcatctttccacttcttctccttatatttctacgtttgttcgcaaccaggatagtacggaatctttcctgactgccattggccaactgcatgttctcaatgctgtcccagcgttggataaggtcatcagcacgggctctactctcccagatcttccaagatacccatgggatcactcaaagaaattctggtatgagtctcggttgagcaaggagtggaggcatcgcgagcacaaatatcacgatcttttgggtgtccgggtaacagagagtcctgacttccatcctctgttccgaaatctctttcacttggacaacgccccgtggattcgcgaccacaaggttggtgatgatattgtattccccttcgctggctatgctgcgatgattggcgaggctgtgagacaggttaccggagttcgcgaggcattcaaactgcgcaacgtcattgtcagcactgcccttgtcttgaatgagggcccaccagttgagatcatgacaacattacatcgccatagattgactgattccctggacagtgagtggtgggaatttgccatcacttctcacaacggagcgaattggatcaagcattgctcaggcgaggtcagatcgcttaacgaataccttgaagatgtagacaagaaagcccctcttgtgcgcaaggttgaaacacgccgttgctatcattctatggccatgtctggtctgaattttgggccatcatttcaacgtcttgaccatgtccgctcagacactgtttcgcagagcgcgacgtctgaacttgttgcgaaagatactgatggggataactatcatttgcaccccacagtcatcgatgcctcacttcagctgctcagtgtcgctgcttccaaaggatatgccgaaccgataaccaacataatggttcctactcacattcaagagatctccatctaccgctgttatgagaatgtccacgtccaagcttccgcatcttacaccccgaacggctctatcattgggagtggccagtgtattactgcaggggggaaagttgctttacgcagttctggaattaaactctctgttctcgatcatcaggaccctgaaaagggggaaccccccattggctgtgcagaatgggctccccatatcgacttcctggatgtcaacactctcatcaagccattgattgaccgcagtgattacatgcccgctttgacagagctatctcatctgtgtatgatttacacacagcgtgtgattgcggatctggatactccaatcagccacatgtacaagtatcgatcatggattgatcaacacctgttgtctgtggatctgcaaagtctccaaatccttgacaatattgccattaaacagcgagtgaaagaactcgttgaccaaatttcccaaactaatggcgcccatcttgctgttggtattgaagtgattttcaataacgtccaacagattttcaccggggaggctgaggctctggatctccttctgaccgatgacatattggccaacgtctacaacgctatggatcagtgtgatatttccgaattcatcaggaacttaactcacactaagcctaatctgcgtatcctcgaaataggtgccggaaccggtgggtctacagctaatatcctgaagctgttgacccctgggagtaggaccctatacatgaactacaccttcacggatatctcatctggcttctttgttgctgcaaaggatcgatttgccagttacccaaacatcgaatacgctactctcgacattagtaaggatccctccgatcaggggttcgatgatcgcaaatacgacctaattctggcgaccaatgtcatccacgccacagcatccttgaacgacagtttaagcaacattcataaacttctttctccgaccggatggctcctgctccacgaattgacacccatatccaaatggatcaactatatctttggaaccctggccggttggtggtacggcgaggttgatggccggtcgggcgagccgtacataggcattgaacgctgggcaaaggaactcaaggccgctggatttcgcactcctgatgctgcagttctggattcgaaccaaccacatcagttgaacgccatgatcgtggcgagaccggaggttgacatcgcacctaagaaatgcgtcactgtcttgaccctctctaaatcaatgtccgtaggtcctttgcttcaggctctggataacaggggatactccgttcatcattctcggtttgacgaagagcccctgcctgaaggacaagatgtgattgccttgcttgatgaagaagccccattcttcgaaggcatggataaccaacgctttgactctttcaagaaattggcacacagcctagatcaacgtggtgttctgtgggtgactcgttcatcacaagcccaatgtcgggacccgagatttgcccagatcaacggcgtagcgaggacgattcgcaatgaattgcgtgtcgactttgctacttgcgaggttgacgatcttgatgtctcttttgagaaactcatcgacgtatatgagaagttccaagtccgccaggaggatgagaccctcaagcctgaatttgaatacgctatcgtggacaatacggtacaagttgggcggtatcatcctttctcggcgcaaaatggacaagaggcgctggcttcaaatagtagcatcgcccttcgaacaagtaaaccaggccgcttggcttcgttacactgggctcatggggatatcaaacctctggagggagatgaggtggaaatcgacacttacgcaatcggtttgaatttcaaggtaagttcgaaggtaacaagtggacctaataacacatactgatatgaaacaggatgtcttatgtgccatgggtattgtcgaagccaaagaaaatgaatttggccatgaaggcgcgggcatagtccgccgcactggccccgatgttcaaagtctgaaagtcggtgatcgtgtcatggtcgtcgggagctgtttatttgggacgcaattagttctctccgagaacctgtgcgagaagattccaggcggcttaagcttcagtgatgcggccagcatgccttgcgtgttcagtacatcgatatactccatctttgacgttggaaatctgaaaaaaggacaggtttgttccccctcaaccttttgacgttttaggtcatcttttgacatattttatagtccattcttatccatagtgcctgtggtggagttggcattgcgaccattcagcttgctcaaatggttggtgccgagatttacgcaactgtcggtaacgaggagaaggtcaggtatctcatggacacgtttggccttcctcggaacaggatcctaaactcccgtaatgcctcgtttgttgaggatatcatgcgggagacaaatggacagggtgtcgacttggcattgaactcattgtctggtgaactattgcatgctacgtggaaatgcattgcaccttttgggaagatggtcgagattggcaagcgagacttgattggctctggaaaacttgatatgactcctttcttggacaaccggagctattgctgtgtcgacttggatcaaatttgttccagaaagccgatccttgcaaagaagtatgtatcgaaggggatgacaatgtatgagactcgacaactgacatattatgcaggctgctgaaggaaattgtggacctactcaaggagcgctacatctctcctatccgacctatcaaagtctttagttctgatggaatacacgacgctttccgttacatgcagcaaggcactcatctaggaaagatcgttgtctcgatgcgtgatacttcaggccaggtcagcgctgtacaaaacatccagccacgaaaaaagcccacccaactcaacagctccggtgcatacctgctcgtaggtggcctcggaggcctgggtcgggctatatctacgtggatggttcaacgtggagctcgccacctcatatatctttcccgaactgcgggttcgagcgaaagccaccgcgagtttgcccaagagcttgccagtatggattgtcgtgtggactttgttcaaggtagcgtgtccaatatcgcggatgtgaccaccgctgtcacacgggctcaaggccgacttcggggcatcttgcagatgtccatgatgcttcgtgatcggagctttgaacgcatgacactagaagagtggaacacatctgttgatccgaaggtcaagggaacgtggaaccttcacaatgcttctgtatctgccaatgcggaacttgacttctttgttcttttcagttcggtgtctggtgtctttggactccctggtcagatcaactatgctggtgccaacacgttcctggatgcattttctcaataccgattggggttgggactacctgcttgcgcgatcgatatcggtattgtcgaaggagtcggttatgctgccgagcaggatgaaatcttacaaaagctcaaagccgctggtggtctaggcaatacggtctcagtgagcgagcttctgagcgcggtagaggcagcgatgacatctatctcaagtaatttgagaccccaagcaggcaacttcggcgttggaattcggcccaacgtgcctctggccgatcaaagaaaccgtttggtctggaagaaggacatacgaatgtcggtgttccataatactggagcagctggtaccatcttgacttctgcttctgacgctggtgctggcttggaggcttttattacacaggccaagggcgacgctgcgctaataaatcaacctggatctgctcaaatgctcgccgtggaaattggaaagaaggtgtttagcttcttgctgaagcctgaagaagatctggtgacatcttgctccttgtctgatcttggaatggactctctcgtggcaattgaggtgaaacagtggtggaaggcgacatttgggttcgatatcagtgtcctggaattgatgggaatgggctctctcgatatactcggagagcacgctgctcatggcatgcttagattgttccatggtgtacaagatcaagctgattgagcgagatgtggttatgtttcactttttgatgtattaaaaggaacaaatcgggaaatagaatcggcgagatatgatagccaggtctcgccacattccacttctttttctccattaaaacctaagaattatgtggcttaaaagtgacagcagagtaatatgagctatactgcacccaccgtttctaattattcatgttctgctcagacttgatgtgatacctcaggctgaggaagtcggaatatcgtcgcccagattcccaatgccacagccagcatggcgagcaagattggctgcagcaccgtgacccctttagcctgagcaatggcaccaaccataaatgggaaaacagcaccaccacccatagaaagggcagctgcaaagccaatagcggcaacgtgaagatttttgggtagcaatcgtgtcgccacaaccacaactcccgggaagatagtccccataaagaatccaacaaaggcaaccgcaaccgcggacacgatgaactcaggcacgagccagaagatgagctcaagggcaattgcgagcgagatgtagacaacaatggacaacttctctccaattcgtggcgacacaaaccctagcacgaatcgaccgactgtgatgccgagccagaagcctgtctctgccattccggattcgaatgggttgccgtgtcggactttcgtcataaacacgacgatccatccaccgattgctacctcaattccgccatagaggaaaaggaagacggcgcatatccaagtgaccttatatgtaagggcaagacgtgtttgggagaatgctcctcctctgcctgggatactggggttctctttttgatatttactactagtctcatcccagaaagcgctggcggagtaaatcagcgagatcacagctgctccggtctatatttcatcgttagtttgtcgatatccagtggctgtagagaggatcgagataccatcaaatagtaataagagtaccattcccatccagctttggtgattagactcgtagcaatgagagggcttattgtggcccccacgccgaagaatccatggaagaaaccgagcacttcatgcgagttcgccatgtttccgatccatacattccatgccgcgttgtgaaatccgctccccaatccaaccaggacgtacataatcaccaagactggaaagggcgggtggatagatatgactgcaaaggcaagcatatggcaaatcggggcaatgattgtgatccctcgtctgccgaaagtctgatgaactgaattgctcaggatggcggatatggcatatcccacaaagggcgaaaggaacactagagaaatgaccgtgtagctcttttgatagtaaatctctagctgaaaagttcaataagatggtcagcgatcctatacagatcaagtaaagctgagttggtgacacaaacatagggaataattgctccatatgcagcatcattggaccccatcacaaatgcacacaaacacgtggcagtcaccttccatatggttgtttttgactcgttccatcttggtgcgacgttcactgcatgcaaaggtgggctttcatcggtctctgaaggcgtagcttcgggcgtatattgaccaaattcgcccggtgtcggtggccaggatggccgtgaggtcgatcccgcgcttctggtcatttcgaatcgtgtcactcccaaggttgaagagttgaagataagagtaagaattgtgagattgagggggagcggggaaaacaagcaaatgtaaccctgatatcccatgtcctatatgtgtagctttatagatctatctctggaacatgatgcataatatctagttccagttccattgcttctatttaacgtcagttaaatctacattcgcatttgaatcaaaaccaatgatcctagtaagttgcctagcgttccgaagccaacatacagccctagaggccaaataaggatatgaaaagccctcgagggtgcccagatagaacaaagtatcttatagacccctgtcaatcttcaaatcgtgcacatcatcaagtaatgtgggcaatatagtaaatgccggtcacgtggtggtattcagcagcgcgtgtttacccgacatcggaatatctttggaagctaatcggagtcaggtgatctgataagccgataccaaaatagcactgaaataactattatgctcagtaatcaggtcggatgactaattatgccactgttctaaggttgaccaaaggagatacatagtgttcaaaaagtctgttcccactgccccacttgctatccccctaacaaccatcgtggttttttttcttcttcctacacaccccccaatgacattatagtgttcaaaaagtctgttcccactgccccacttgctatccccctaacaaccatcgtggttttttttcttcttcctacacaccccccaatggcattaaccaaggatatccttggtttaggtcgtacaaaatcaggtgagctatctgttactcagcgctcagctattatttatacccaccaggccggtgccacccagtcaaagctagcactcgattttaggtactcccgccgaacgatttacaatactttgaaacggttcaaagaacacaatactgttaaatctctcccttgaaccggtcgcccaaggatctttagtgatcgaactcgccatttactttttatactcgcccgccggcaccccttttggtcctataaaacgctgagttgtgctatacctggtcatccatcccgctctactattattaacgttttaaggctaaccggtcttctaaaatataggacaaaaaggaagattctaatcggaaaggaattagctcgacgacgatatcgttttattcaaaaatagcgctctgagtggtctagaaataacgtttaaaactaggtcttctcggatgagtattctgtacaacgaataacaaactgcagaccacaatggtgttggcgctttcggtcggagggctatagaaaagatcttataaatgctaaggtatacattaaagatatttcacaaatggtttagggtacaatctggttaagaagtcgattagagttgattattataaggcgggagaatattattaacccggaatcgaagaagacaggatatactactatttcctatatagatactctcgaagaaggtctacttccattctatcgaccctactctatcttttagtaagataacactcggatccatactactaaaatcacacaggaatggtttaaaactcacgggatatatatagaggagtagctgccgcactcactagatttaaacccgattgaacctatatagcggtggctaaaggttaaactttttgagttatttcctaagctaatatatataggaaggtctgaggaggattagatagtattcaaaaggtatataaagatagtataggatgctattccgcagtcgaagattgattcattgattttaagtatagggcgcagatatatggcagtacagaaggcaaaggggtattatacaaaatattaaatttaaattttacccgagattggcatagggttcaaccctatttaattcgaagtaaattgagtaaagtatggtggtgctatgcatagatatataaagatatatatttcaatgttcatgggtgaaaatgcgggtgggaacagacttattaaaccccactgtatgtaagccatccatggaaccggccatgatcactagggcggtgatgggagcggtgagccaaaaacacccattggtagtggcacaattcgtcgcccgtaacagatggcggctggcgcctccgtaaatccgtaaacctcccaaggtttccatctaggccagatcagcatcttctcgttgaaatgactacttcgcagatctccccgaaaaagcataatctacgggagttccttcagcctctccgggtcgagctcgagaccttgtatgatttgtcctgtcggctatcatcgtcttataaaaagttggccgcggaatcttcagaacactttattccaacggctctgacttgtcttccaacgggtcatgaaaagggacgctatcttgctgtctattttggtcagtcctaccttcgtgtggccttcatcgacctcttaggagatcaacatgtcgaaggacatgcacgggtacggcgcacgttagagaaggcatggcctattgcagagcatttacgaaaggatcattacattgatctcttcacgtggattggagactgtatcgccgaggtggtggcagacagactcgccaacccaagtgaagagcgggtggaccaaataacgacaggcatttctttttgtcttcctataaagtacagttatctcccagactcggccgtgtgcttctgtggctaatccaatgtagacaagattccctcgatgaagctatcttgatgccgacagggaaaggcttttctttaaactcagacctcaatctccgccaagccttgctgagtggatatgaccgccatacatattcaactcacggggatgaaatgaacatgcctgctaaacgccgcaggctgttttctcttccgaaattgaaagtcgcagtcatgatcaatgatacgacagcgactcttgcttcattagcgtactccatcccttccttacccaacacccgtgttgttatgggtctgatcgtgggcgcgggatgcaacacgaccgttcctatgaaacttgccgacttgcataaatccaaaactaaaagcattcttgaaaagcaccctgacgcagaggaaacgctcatctcgactgaatggactctctccaccgcggcgggtcctttcgacgagctgggtattcgaacaacatgggacctccagctggataggaattgccaaaggcccggttttcagccaatggaatatatgatcggcggtagatacactggcgagctcgtccgcatcgtctgttatgattggttccatggagtcttgggaataccacgctccgagttaccactgaagttggttgaggaatattctctttcaacagactacctctctcttgttgttgcctcttctctatccgatgagcgcttagcaagcgagctgtccaagacactccagccatctcccgagagtgattggacctggtcgcctgaatatgcccgtgatattcgggtcattgcctcaactgtgcaggatcgagctgcttctttggtggcatctgcggttgttggtctcctagactgcactaatgaggtccaattgtgcaacacggcacccaagtgcaacaatggagaaaaagtcaatacggaagctggagttactgaacagacggactccgaatcggtctcatcaccaacgcgaggttggaatagcgggcccgaagaactcgctgtggccttctcgggtggagtgattcagcactatcctcactataaagaaactgtacagagatatattgatcgacttctactgcgagctggtcctcaagtaggagggaaaagtgtcttcttgcgggaggccagtgatggcgggctcatcggaactggtgtccttgcaggaactgcctcgggggaaattggggaaatcaaggttactcctaattagatatcaactaattcccctaattcatagtcatatagatgggttataaatattatctcacattttccccctcggagcttcaccggggagaaatgcatatcacatgtcgaaaagccgtttctatataaattactgcctcgctataagtctaggcatcccccacagatgcgaggacacatggagagaaattgcgcgaaagcaatgcccaagaaaccatttgaaagaacgtgtaaacttgatgaatgctcaacacggtcgattctcagttccaagagtacacactacgtcacatgttaggccttcaagaatcacaacctctttcaatttgtagcatttttgttcttctaaatcatcacatagcagatacagtagcaactgctctccctagatcattctccaaatcatcaaatgagcagatggagtagcaactgctgtccataatgctcgctgtagtgtagcccttctgcttaccatctccagccctctttgtcgaaaagcacatcagtggccgtgacaggaaagaactgatccatttccttggatttcagaaccaggctataccagatacggattctatcaatccactcctcgcttgtgtcgatgcgaaccgcgttactgaatccggagatgtgcctgaagaccattagctcgttcaacattagaaatgatatcatggggcatacatctccccgttgttccaatcgtaaatgatcttggacgactcagacatgagtggccgatatccgcatttcacaagcttcctggttcctattagctctaggtactttgtcgtaatcagagtgccctaaaacatacttgtaagcctcgcaaaacttgtgccgaatctcctctcgcttggatatgggataactccaaaacccttttctatcaagggagtctccggggactttctcccacaccagataagtgatgtagccccccggggacgatatcgtcctcatcttacttccccgagtgatacccaaggagcttaggcacagcatcacagccttgttcccggaggtccttgagggcaatcagctcgatgtagtcaggtgattcgacggcctgggcagcacggattgtaggcttctggaactcagtcccagcgataggaatctgcttgtaaattcgcataaatgcgatcttttgggcatcggaaccggcggggcgacaaagaaactttccagcaacatctgaagggcccaacccatcggccacgtctcgctcgtcctcgacctctgcgttctcttcaagcttctcgacaatttcccaggtgccggtgtgaaacagcggttgtggcgatgagttgagggtaacctcggtgccttcaaggccgacgaggtattccaaagatgtggtcattatgggctgacagttgataaaactggaaaggcaattacaagagtttagaaagtagggtagacagagagtgaagaagagaggaagaaaagtttgtgggttgtcctagtcatcacctggtcattctcaggatacacacagcaaacaaaggcaatcactgtcatgacacagtcaaactagatcccatatcgacataactactcagttagctaccatatgcttgactttcatgccatatcgtggccatcacgtttacaccataaatattagttcccagtgtatctgattggaataacgcgagtaggtcaagttgtatgggtctctaactctctaaaataacatccgaaaatgacaatttggtgggacacaggacacgaccacaatgtcaaggatttctgaatctaagaacagaggcagccggaaaaaaagatcccaaaacaaaattcaaatgatgcggttgtgtgtgtattgaacaagacatggtgaatggaaatcctagatagagatccactggttcctaggcgtatttcggtacacgaccctgaccagctgctacgctcgccaggaaaaagaagcattgcttcgtcgaaggaggctccatctccagtgggtccgcgtgtgtcgtcgacttcacgatgggtgaatactcaattccccaggtatttcccaccatagtctgtcgcaggaatatggtctgctggtagtttgttatccagccgtacataatgcgaaggtctaacatatagcctactggctgggccaggagttgtcgcattgttcatcaccatggggttttcatttcgccgatagccttgagcttgtaggtagtcgcgggtcggttgagatcaatgcaaagtcaggcaccaggctgtactgtacccctgctgccttgaaatcaccaaactgcatggatttcatctgggcgtctagagccgctccaacaatttgtcccaccgattgctggaagcggccctagacgccatgttcgtcgcccatggagacaagctcgcgatgtaggtctcgagtcgcaagattgtggtcgacgacttttttcgaccactgttcaacatttgtgagaccccagacagagcctagaaagcttgtccactcccttagagggccaataaaagtggctttcttcaaggcagatgatgttgtgtgatcatcttcgacgaggaggtcagggagagcgttgtggataactttcttggcagttagtttcttcaccattctggtggattcctaatagaatcctcgttaatataccaagacagcgtagcgtgtaccgatcctagactctagagtctgactcacttgaagtaagagccgtagaatgtggaaggagaggatatgatgtaggaaatcctagaccacagtggtgccggagaagtgtgtagctacagtggtgatggagaagaaaacattcttttttatatgggaggcgcggtttggtagtcatctcgcagaagatgcttctccttgtttccagaggtagagatcgttgtacagctccatgccagtagcaaacaatctgttgacaaacaaaagaagcaaataacaaatatgaaacaagcaagcaaacagtgtaagcaagcatctgatccacgatctatagagtcattagtatagtctacctagttagttgtactatatggttaatgacattactattatatgtcttttttggtatctttttgggtgcccgttttggtgtcctttttgatatcttttacattactattttttaaggatcttgatactaccatagtactaccattacttgggtactatcgactcgcttaattctctacgatgtagacaggaacgacccccagaccgtaaaaagtaggacaggagtgtagctcctgggaaaaccgatggacgtacaaggagacgatcaaccaaaagtgaactgtctagatagatggaagattattatctagctaaaccagaggttgcacgtttgcaatgtttatagaagttgccagctatatcaacattcccacttcttcacttgcttcttcttcttctctgtctatcttatttatcgaatagacctggcacatcacaccagagtgaataagaataagatcaataaaattgagattacatagtcagtcgactgtataggtgtgcaaatagttttgtagagtagtttctcgttgccaagtctctggtctccgatttcaatatatatcagcccctatttggttagaatccgccaagaactgaacgcaagacttttcctcttcctctattgcgatatctcaacgcgaataatcatgaaattcttcgatgtaagagaatctctttcattttttcaagcagcctgattaacactagcaccaggtcgccgtcacattcacggcagaccaattccaaggcatctaccgaggaaagcaatatcacgaaccagattttgcagaagtcctgaaaagagcccgagaacatggatgtgaaaggaccatgctcaccaccatgactctagagggcgcaaaacaaaatttgcaggcagtgagggagttccccgcgatgtgcaaaatgaccttaggcgtgcatccgtaccatgccgccgagatctatggacagccagagtcccaatatctgaatgagctgcgcgaactaggtgaaacgctcctagctgagagtccctcgcctttggctgcgtttggggaaatcgggttggactatgagtacctggatcgggccgataaggaaacgcagcaacgcgcattccgcgaccaattagagctggccgtgcaattccagttaccgttgttcttgcatgttcgtgagtcagccaaagattttatttccatcatcaagccttttctgccaagactgtcgcgtggtggattggtgcattcttttgcagggacgaagggggagatgctccagctcgtggaactgggtcttgacattagtgtcaacggtatctcattccggacagatgaacagttggaaatggtcagaaatattccattgaacaagttgcaactggagactgatgcgccatggtgcgaggtcttgtctaatgaccccaaaatcgcgggttatctggaaactgcgaagccgttgccggcgagtcggaaacataacaagtttgtactaggccagatggtcaagacacggaatgaaagttgtactatagagcgtgtcgggttggttgtagccggtttgaagggtgtcgctatggaagaagtggctgaggccgcttggaacaatagcagtcggatgttttggttgtgaatatataccgttgagcaggaaaattagaacaatgtacaggacttgaagaatctctttttgatttagctggtttaattggatcattagaagtatcgatacttgaagctcatttgtagcatgcttaactagcagagtaatgcagactagtagtagttatactacgtaccccaaaatgcgccgtgtagatctagtagcaacaagctttttcctacgccatgaactcaaaagcaatcttggtagatcgacgtagatgtaaacaaagcccttgtatcagcgaactatgactggtgccctgaatagacatgcaggggggaacacaggggtttcgatcgccccttagggcccgggcatgaggccgagccccaaactggttctatttcacaggccacgatcggccgaaatgaagtagacagaatggagatttgtcaatctcaatacttgattactggacaattaaatctataaataattgtgacgcgtccttttttgtcttttcgggatcaagattcctgaacagaacttggctcacggagattaatacaggttggaatgaaggaagacgtgatgccttctttttcacattcgatcgctcagagcccactatgttgcccctcgagtcgttgccactatacagcagggttcgtttatatggcgatctgagtatctgaacaacacgaagtagggaaaagatctatatgactttctaatgggtgtattgagatcttaaatagactcattgattgtgttaaattgtcaattatttacccttaaccgcctatgcgaagttaagcacacatcatgatggagggccacggtttgttgacattcttgacgttgcgagggccatcgctgaaccatcagcgcatgggtatctgccattcctccacggagttatgtggaatgttattgaccactggccatgtatttatactaattgctgtcgaccagctcgatctttattcacacttctcaagcctctacactcttaaattgaccctggtggttaagtgtttatcgaagtcaatatacaaactttgcaaagacgttgtaagttaatcgctgaggactgcttcgttctttcctcaaaattcattcgatgcggccattgtcacttccgagactaacaagcgacttagaaacacatcaatcacaatgaagggcacattgatcctctctggtcttctggccaccactgtctcggctcacatgcagttgaacaagccttaccctatccgcagtcccttaaacaaggatgccaagggcgagaaggattattcttacaccaaccctctctccacctcgggtagcgattacccatgcaaaggatatgccaatgatgcctttgaggctgtggatacatggcaaccaggctccacccaagagatgtcgttggaaggcagtgccacccatgacggcggctcatgccagctctccctgacttatgacaagggtaagacattcaaggtcattgagtcgatcgagggtgactgccctattgctaagaagtaccaatttgatgtcccctcggacgcacccaccggtgatgctctgttcgcttggacctggttcaacaaggtcggcaaccgcgagatgtacatgaactgtgccatgatcacaattggtggttccagcaaccacaccgttgtcgactccgagggccgtgtggctaaggagaccccaaagcaggcgctcagccagaagacccatacccacactacgaacgcgaagagcagcttcgatagtctccctgatctcttcattgccaacgccaaccaggctggcaagtgtgtgaccgtcgagggccaggctgttcacttccccaagcccggtcccaaactgatcggcaaggccgatggccctggctacaagtgcgccgaccatgctcccttcctggacgacagctctgattccgcgacgaagtcatccaataccagcacctctacctccgccacctccactacttccaccacccccaagtccgagaaaaagcctgctgtcatcagcacctcctcattcaccacgaaggcgatttccaagatcgcccaggccctcgccactccttctgtcgcagctgactcccgtgtgcaatctgccgaggactcatccaacaaccagtttgtcgaccatgtcggtcaatggtcttgccactctggggaaattctttgctccccagatgggttgacctttgccatgtgcactaacggcaagcccatcttcatgggatccgtcgctgctggtactatttgccgttggggagctatcactgctcgccagtaaaggtgttaattctttttttcatttctcttgccgattgtttttttttttttccgcatacatcccagtggatattttgagttatcccagtctatagactgatcagtcgagtgaggttcactcgccaccgccggtcttcacttttcacagttcatgatttcattcagcctggctttgggcactctttattgttcgtcttatatttgtttcacccatgacctgttaagcgatgacccagtttatgtcgttattgtcaagcaaactacctaatgattgagtgtgttaattcaaaaattctatacatcctctcaagacatagttctcccatagaacgtcaaacatcaaagtgacaggatcaaataaagatttagtctgtatcttgtacaatgccttctcactgtgttgtcaccgtaacttgcagatggatattcacttacaatctcagcacaaagttagccgaatcagtgttggtgtagatcatctataggtctgcttatcatagagtatcaacaatcattccttccctgaaatgaattgaaaaaaatggaaaaggtggaaaggtcgaaaggtaaagtggcacctatagagacgtgaccaagcccagcgccaggcggtagtggcttgcggctgccaccgggcagcattggcttccgggtgcctatttagttaagagaatccgttgtttacttttttctcttctctatttctctggcatctcagatactcaccacatgagtttcccaatatgatcaacccgggatgactcttccaatttcctacaatcctatcagcttttacggcaagtcttctggtgaaggcttggacccgtacccatttgaatgaaagaaagggttcatggtgcgggtaaatgaaagaaagtcccggagagcgagcttcttgatagcttcggcgaagtgaagtagaacctcaaatacgtacggctcactgacgacgctgctatcatctctctctgcatacatgacaagaccgagccatcatctaccctgggactttgattcaaagggagacatcaggaaggtccgagtccaactgtaagtgcagtgtctcttttgaatacgaagttttacaataccaatgatgctactttgcataagacagatgatctcgtgtgatacgggataaatggcttgctgcgctatataccgcgagctcttacgggtcaagatctgcgacctgctggaattttcacaagaagcaacaatgatctagaacgatcaagaccccaatttttggtctccggatgttcatcgtgagagagtctatgtggggcttggtggcattgagagcaccaatctttcgcatttcatacccttcgagtctcctctcatgttcggaggtgctttgagcttcagtcaaagcgttgtatggacggccaacagtcatcatatgttatttttgatcacctggatgagcctaccctccagtagggggggggatgtatcgataatgtgtctgcagggagcctccttcaacattcattcgtgactcgtaacttctcttcccaaactctcatcctcaagatgtcgtcggccagcagagaagcagagtcactttcgcaaaccttccatgaaattgcaaacaaaatcactgactcacaaaagattcgaggttgcacacaaggactgcatcagacagactggctgaatggacatggtccttggttttgttcgacaagtcactgtgtatatctggaccgcgattcggattatacgaggcattgaaacctcacattgtcccctgggcatgatcaggtatcaattgccatgattacggaggaggaagcactttccggctacttttgtaatgggttcaacacagaggatttctatctctgtttccgatttgctgagatcctcgacatcgaaaggacaggcccagccagacagccataccttcgaaagtcagtctcctactaagatcctgaggtggagggaagatgatggggtcttactctacgtatagttgtttaccaaaattcaccttgtgccatggggccttctctgggccttctcctagtgcaaatgaagaatactacggacagagcttatgattttgggctctaggattgccatgtttgtcctgtttgataggactatgaatcgaaacatctctctccccattttagcaatgtatgcgaagtggcccgctaaatggaatgaacctggcccaagatattcaactgcacttggatcaaggagggcccgggtaaatgtagctttttcctaggtgcatctcttgcgagatctgtcggtgggcgtggatcaaagacaggaacatgtcactctcttttaaaacatgttttcgagtccctaaataagtattcgctgtgttttctctgtcccgtcaagcttcgagtatggaaaccgccaaacatgataaaccgaaaacgtttgctagagtgaagcctgtcaccaatgtagagcttgatgccttgcaaagaacgtcatcatcaacaatctaccattggttccccgcatggtcggatccggtacgccgcatgcggaaagtgaggctgaacgctattgcgtccaggaacacgaaactcaaatctagacccctgacgaagttacaggatatagataaatatttatggggcaatgtattcattaatattaaacgtgacaaggtagtctcgaaagacccaagtatggtcgccagatatccttcaacatattgtacaatccagtctaatcacaaacatagcagtggtatcttggctttcaaataacacaaaaggggcatagaatcatcggccagtgcacgagcactagtctactcagaaaagatactgtaacagcaagcatccgacagcaacctagatgttgccagtatacgccgagttaccatagccatagccaccggcagcaggggcagcagttggaggattggtggtgttcttgtttttgttccaagagttgaaccaggtcttttcgttgtggggctcggtacccatctcgacgtcgtagggggttgggtggccaggtagggtatcggcggcgccagtagccatggggctattcttattgcggcgccagaaggccttgcggctgccgttggtgtagccgttggtaggggagggaccgaaacgcttctcgcgcttgtggtggcgggcgagaaggatctggaagaggatggagatcaagtagaagaagctgggggataaattagcatgattcagatagccgtaatccggggtacactcacattccgataatcgccactgcgaagacgaccttttccagtttgcaggccatgctgaatttcagacttgccgacacggtcgaatcgtcggcattgcccgtgcccattggcgtgtccagtgttccggtgcatttatcaactcccttgcgggtcatgatggcgatggcgatcatcgcgcccacgaagcatatatccagggcaacgcccaggaatgcgaagaaggctacaccgcccagacagcaggttaaaacgacgccgagcagactgtaggcggtcgctgcacctgataagccttcaacggccttgatccatgtcgcaatgtgttggtcatttttggccaagacagccagaaaatatgagaagatgccgaggatgacagcagcatcaaggaactgcagaacacgcagtccgagattgaaaaagcggaggattaccccgccagctcccatcttgtatagtgtatatgattatttgggtatagaggtgacagtaacgacaacagggtccaggggagaatatatgaaagaaactcaggcagcaggatttgggcgagttaataagggtggaccgaaacaattggcgatcagtggatggcggcacaatagggtacaatagtacgtcgatcctggacgacaccggcagctcaatggccaacggcgtctgcgccacactctaaatgaccccagatgggcccactcggtgatgtcagtaccatggattggggagtttagggttccaccctggctgtctccggttagagagttcgccaccgtaccacgtgaggaaaaaaatcaatacaatgttgtagtgctccagccacactgccaagacaatttcaacttctaccatgacccttacactttatactttatactatccatagattccacacatatcattgcttcctatttataggtaaccagccttcacatgatcaactgttccttgaacctggtccgaggtgttcatcgagactttcagaataaagctagcacagattgaacagtatgaacttatttcatatcctttcatgcatgacacaactttcatatacagaccatgttgttcgacaccgactaaccagccactactgttatattttactttccagcgccttcatattacataatttgcctattttcattggccctttcatccatgggtgtggctgtgctgcactgccatctagatttcattgtatgagcccgccacgctgggaatgacgtctgcatccacccatctcactaggttttacacgccacgttttgccgtttacaaacattacaaacatacgaggtacaatgggaagtttgatattaaaactgggtccgccacatggaatggcacatcctcttggtggtcaagtttgcggggtaaccagaacgagatgcagtatagcaaggcgagagagattgaaaaaaaaaattaatatgtgcccatatggtacctgtgagcttgtgatccatcaaatccccaagctagcgcgtgtcgcctaaataaatctaggatatggtgctgctaaccggacgaagcacatttttagtcaggagcatatttatgattccggccttgtaaagattccgtcatcgacccggacggacaagatatatcggaccaatgctaggtaggtcgtagagtggtatgactgccgcccaggttctcgggcctatggacacctgttgcccaaagctgttcaaatcaagcgagcttcttggaaaaacaggaatatggccattaatgcaggtgttgggttgaccttgccaatgtccagggatgtctagcaatgaactctatcaggctctcgtgttccaacccatattttactccattttgggaaatctgaaaatgaaagcggcaaaatcctcggcagtagctcgtgaggtatggaagtggacggtatcttcttgtcgaccatcaggagtcttcctggcgctgcttttcttgttcagcgaaagcacggagaattgaatccagtccctcattacggcgagcgagtagcatcacgtcggatacattgacggtagatctcccagcgtgcctgaaaaaaaaacgaggttagtacatttcttattagatgtatgtaccatcccgaacaattggctactcaatcgcagcaatgcgtttgcttacttcgcaaaggattctagatcctggctgaccgtctctgcgaacatagtcagttataagggtaaagccgggaacttgaccaaaaaagtggaacttacctatctgagcccaaaccatctctgtcaacgcaccgatgaactgcggagtggcattgacgcctagcctgatagtctcctcatccacgatcttaccgatagacaaccacagcgcggatttcaagcgctacaaaagagagttagctagttacataccaagatcctcctgagactgacctcctccagactagcctcttcagtctgctccatggtgatgtgatagtgcaagacaacaagccgagcgcgtgcccatataaaaccaacaacatatgattggccgacgacgcgtccacggattaacggctaatccggcaacagtcccacgctaaccccgaaacagacatctctcgttgcgggagccacggaatatcgaagaagcgcaaagcaatgacagatcccctcaattaatccctcaacccttaatcttttaaaaatcccccctactccactctcaactccctctgagtgtcctcttctccaaccaccccattcagcgggtagccaccgagcacctcccaccttccacaagccctcaaccaaaccaaaaaaaattaccaccggccaaatcacacacacacacacacacacacacacacacaccatggccacgccaaagcccgatctgagcgacgcggccgccgcggccgccgaagatttcttcagccagatctacagcttcttcgagctggttgtcacacggctgttcaaaaacggctacgcctccatcgtgcagatgaccgagatgagcggcaagcgctgggcccgagtcatcggcgtcgtcgtcgtgtacctaattctccgcccgtacatcgagaagatgttcaagtggatgtacgagcgcgaccgtcgcaaggagaaggaaaagcgcgagaaggagagggcgcagttcgggaaggtcaaggtctcggcgaactcgctgcgtgctggtggggacaaggggaaggtccttggtgaagtcgataacacggatgacgagctcgaggatgaggaggatgttatggctgctgctagtggtgttcctgagtggaatgacttggctcggaagcgtcagaagaattatattaagcgtgtcaagaaggatcagcgcgcgcaggatttgagccgggagcagattttggagttgttggattggagtagtgaggaggaggaggtggatgcgaaggtcaagaaggatctatgagatttcgacttgtcttggtctagggctgttcttgtatctgtgcattgcatgggaggttatgctgcttgtattgtttaatactagattctaatttaataagacctccacggtctctctagctttaagcgaattttctgatctactcgtagcatctctactgaggactctttaccttgcacataacatatacttggaagtcataaatctactatttgcatctaaagaatgcatccaatccaatcatacccgagccagaactttatcctgggccgttctagaaactatgtagcgatcgccggatcttatccgtattcatgaacaattcgtaacatatcaccaatgtctcgcaagagatcagtgaagcctccgtaaggcctcgatcattctcttgacctcctgcacgtctgaggagccaacatcctgcacaatctcctcctgcatgcttggtgtgcagtgcaagaactgctcaataagttcgccgtccacgaaccgatatggtgtatcggcgctgcgcaccatagttctgaagccgcggaacttgtcgaatgataagttacccaacgaggtgactttggtagaaaggacagattgcagggtcataaggaagtcttgatgttcggggttgataacggcgaagaggaatatagagccctcgacctttgaatgggttagtaaatgagcctttaatgccggtcaaccaagtcaacaaggaacttactgttgctatgaacgctcgcggtgtcaccgtaatgctggacagctgtggaatattaactggtcggatacgattgaccatctcccctagtgacatctcgctagtggggatcaacctgtgcttgtcctgggcggtgactccattcgtattccgagcgagaacgataaggtttccctcggcgtcgctctggaggaatgtctcgtccccaacacaggcaactgctgtgctccagacggtctggtagtgacgaccgacttcggtcagcttggcagcttccccagcgtggcccggtgtaaacctcacaaggcaaaggctcttcatgagatctgccactgcgattaagttgtcgacgactgttacatcgactggtgcggtggaggtccggtatgcaacaagcttctcgagcttcattggtccaacgttattggctttgactctatacacaacaacctaatcatcgttagtacagggttcaaacatacacgcggttagtactcacagtcttaacaagtgccgcaacaacgcagtcgcccatgatagcgagggcccgacaggcccccataaccggcagctcggcgacttggctcagcttgcggccgtggtcgacttccagaatgaggatccgcccgcggatcgattcttcctggtcttcatctgcaaatgccgtgccaacaataaagcggtccttcgtgatctcttttccattttcatctttccctgccgggagttccgcacgaacaacgctctccaccagttcgtcggggcccatttctaacgcatcaaggcgccggaacatgatctcatcagcaaggacaaagtagcttttgacaacctcggcgccattctcgagcttgcgatcaatcgtgccaattccaaatgccttctcagaaggggagtatgccacacgacggacagtcgagcccattggtaaagtttgaatttgggttgtgcgctctctgtcaaccagcgcgatcttcagctctttctcggttgccacggcgatagaacctgggaacgcctctgcatttaaatggcatacccgtgatgcaccctcggagttcactgcggagtagatgatccggccctcggaaccatagattaggctgggattctcgcaggtagcgaagacgttgtatagcccgtcacccttggggagtttcttgaatatgggttgttcggagccaagaatcagcttgttcatctcactaagcgagtagtcttgtgggttgagtgagaatgtaatgacgcagccatcagccatggagatgaagagggtaggctggctgtctgcgagcacttcggctacaagaactgatcgaggaaagctctccccagtagggccgagggactttgtttggagaacagtgaagtccttaatagccaggattgacaccttggccgattgcgggaaccctgcgatgcaaacccctgttggcgttgatgggacggtcagaccggagatttgctggtcagcgccgagatctttctgcgtgatgatctggatattgtccctgatatcaaaggatgccacgacttggccgctaataacgagaaccagatggtcctcattagccgacacggcggtgatcagcttctggtcctgaggagcccattcaaatgtcaccatgccgctttctagatcggccactagcactcgttgttctgtgacctgaagaatacgaccgccctgaagtcttgtggcgagaagagtgcattccgtgagtgaaagccccaggaagttatccaattcttcaacttcaccgtcagggttaaattggaacacacgtgtttcgtcaacaaatgtaacaataagcgtatcaaggaagtcgcctttgcttcgagtttgcagtccccagagatcagtgatgtgttccatttctcccagcacacctaactcctccatgccaacaccactccgcacactgcgtaatgtcccgtcgtcaaaggcaccagaacccgtcacaatccgagcctgcccagatgaaaactcatgcgtttggctctcgtttgtgcggttcccaagatccataatagtaaaatcgagaatcggtgcgatgttagacaatgtctggatcacttcaaacgagcttccgtcgagccggaggacctgagagtcgccgtgatgcgagccaacaaacaacatgcctccgccgagatagaccaggaccgatgcacgagacgtcttgcccagatactcgagcttccagtcatcaatttcacctaagttgttcaggatgaaagacaagaaaaatagccttccatagtcatcagccaatagccaccgctgactatcgaccttctcccaggccacgaagaccgtcgcttcgtcaagattccgcgtaatcacatcgttggcattatcgtcgatatacttgatcgacgtctccccaagcacaatgagaccacccagcggagccgggatagggataagatgcgacgatccaagatcaagctcctgtccaaattcacccccttccaacttctgcacctccttgaagctagcatccgccggagtccccgaagtgcccggcgtgaaatccaactcgcggattcgaagccgcaccttctgctggttatcttcatagagcaatgccaaccaaggattagattccgaatgcaagaatgccgaagaccgaacgaaaatctcgtcgatgcgggatgcagtcggcttatcaagttcccccacctgcaacggcaagtcagcctgggaccctgccatcggcacccggcctcttttcttcgtcggctgcacgatcggcacaacaacaatcacaccctcgtatacttccagcgtcatgaacctccccgtgggatcgatcagacatcgtggtgcgcattgggactcccggcatgagggctcggagatatcaatacacgagcgcgcagtttttatctcacttgattcgcggtcccaggttattgtaaaatagttatattggtctgtgccgatgaagagatggtcggttggggaattcgttggcgcgggtaggcgtgcaagcatagtgacccgcgcattcagagcacgggtcgcggtcaggacgagtccatccggcgtgagcgtgtagaactcaagacgactggcttttctgtgtgttggcagggttagcttgtcatcgggcggcgggtcggcttaggttccgtagattggcgggatgggactcacgctgcgactaggcactcctcgtccggagagaaaaagtttagcttcactgcatggcgaatgctgcttgcccggtggatgggcacgacataagccatggtgattcaatagcccgaggtatctggacagcgcggagctggttggggcttaagcttcggcgcagcaccctgcgggggtgggatatctccgagagtaaaatgtacaagggattgagatggcggaggttgacggtgttgatttatagattgcacattctctagttcaactctgttagggtaggattgcttagtcggtggggaagatgaaagaggttgaggttcccgtgcaaatgacgtctaaagtccgcgcttacaaccgaaaacatctcgacagtcgttcttagttgcaattgaataaatagttacatacatgatggttcaatttgaaagaaagagaaaaagattaaattccttttaaaatcacaagtctaaagtcatacgccgcccaggcggcagtcatagctaacaagctcaaggtcctaacgtgaggccaatgataggaaaacatgcagcgcgaaggaaacaaaaggcgtatcgtatggaacaaaatgataatatataggcgcgatcatctagcatggtgcaagtgcaaagaagtgttcgtaaatcatgagatcatgaccagacgtcctcctggtaactgccgctgctacgcatgtgcttgaccatctcctcgcccttctcagcgggcaaaccccgttgctgggcaataatgtgaccaaggaccaaattgacctcacgggccatgttggcagcatcaccgcagacgtagaagttggccttttgcttgagcaggtcgctgaccagctcggcgttctccttcagacggtgttggacgtaaatcttctcggctccctcgcgggagaaggcagtaataatcttcagggagtcacccatttgatcttggaaagtctaatgaatcatattagtatgaatgtgggatttcaagtgtaagagggtattgtcataccttgaactcatccttgtacatgaaatcctcgtcgctcttacggcatccaaagaacaatagtgttgtgccaaccttctctcccttggcaacaagagcagcacgttcctgaatgaaaccacggaaaggcgcgacaccagtaccggggccaaccataatgataggcttggccgggtcggaaggtagcttaaagttggagtgacgaacgtggacaggtacgtggataccatcgtacttgttgcgaggaccggtgattgagtaagtcaggccgtgggggtcaggggaaggatcgccgttctgcttctgcttgagagccaggaggtagttggtggtgacacccttgaccatgtgcgaggcacccggcagacgaacagactcgacaacagcggtgatgctgatcttatccttttgaacgagagatgacgaagagatagagtaataccgaggctggagcttgttgagaccctcaataagcaacgagaaaggaacggcagtgaacggcttagaagtgatgctttggagcgcctgggcaatggtaaagcgctggtcggcgatcttctcatggaagtaatccttatcgttacccaagcggaccatttcgaccttgctctcctcatcgggagcgaaagcagcgagggacgagacaaactgacgagagacgggggcgcagacttccatgtagtagcggacagcggcatcataggtggtcggggtcgggataggaaccttggcagtgacatcgatacccttgacgttgatcaccgagtgccgcttctcctcaagaccaaagacctgaaggaagcgatcgacttcggcgccagcgttcgtaggccagatggcaatgtgatcaccagtctggtagctgaggttgctaccagcgatgctgatttccatgtgcagacagttgcggtccttgacggtgaacagttcagaggattcaacaatcggggcaatgtaagggttctgcgcggagaagggacccttggcgcgatcttcacggtgggaagcagtaggctcgcccaggtagacggactcgtcctcgggggatttctcatcatcctcgacaacggagaaaacggcttcgtagacagcttcgcgttcctggagactcatggcttccgacagagcagcccacatgggctccttccaggccaggaaatcctcttccatggttccggcgccatcgtcgccctcgccagcagttccaatgcgctgcgcaccaagtttggtcagagctgcatcaacctgacggaccatggcgttgtagtgctcataggtgttgtttcccaggccaaatgtgacatacttcaacgaggacaaaggcttatcttcggcggaggcgccgctctcgaaggcgacgtcctccccggtgaagaattggtagaactccacggcgttatcggtaggctcaccctctccgtaggtggccagcacgaagaatgcgaccttatcatcggggaatttgtccaggttctcgtagtcatagtcctcaatgtcagcgaccatagtcttcagtccgaagcgctgagagccttccttggcgaggcgagatgcataatcctctgcagtaccagtctgggagccgtagaagatgacacagttcttgtttgtctcttccatcttctccacgatgtcgcgggtcttgccgcttttagcagctccattctgagtggcggccgaggaggcatatgggtctttggggacagcccagtagctacccttggtgaaataggcaacgctacccaccaagagagccaccaagacgaccaaatcgagtgtatccagctgcgccattatggtgtggtgcgtacctcgcggggaacaggggaggggtttgttgaggcgcgaattcccgccgggaggggagaattggttgaatatgttccaaagccgggagagcaaacacacaaaggcagtcaagtaaaagaagttttacttcggcaaggatgcgcccccagcaaagaggtctaaacgacgtgtatgttgtacagaataggaagaggaatgagagaagccgacaggtggtctgatcgatccactcgtcctgggcttccggactttctgtggaccttcacggggcaaatctcaccgctgtctgcttacgttggaaactccgagtgtgaagtacatacgaaagtacagaaaaaggtccgatagaatagaaatagcgaaaagtagatcagaaaaataagagtataagagtataagaatataaaaagacactcagaccacccaacccgttttatagtgacaatcgccgagggcaagtcttcggaagcaatgtcggccccaacatgtatggatcataccccgtactccgtaccgtccggcatttttcctaacgttatctagtacggaatatcaaatagggacattccccggccctggagaagaaggcggagctcgggtaagagaagcggctttgctgttcgggaaacgacaacaggcctatgttgtctctgtcgttctgctgcggaatagattccgctctccttccgttctcttcgcttcgagaagatctacatcagaacagctcgaggcttgatagttcccctaacgtggcaaattgcctttctgggctctcggaccccggccttgacatccctgacgtgtggggaagatcgtctatgtagtgcattgtgcgttactctacggagtcgatgttgttgagcttcgacgtttcttctttatatggtgcatatatttcccctggccataatgagaactatattttcaggcttcatctatcgtatagattctgagaatattgacaatataatatcttacaggcgaatgatgtgccgagcccctgatacgttggggttatatatatccaaacacagaagaactatatcatacccaattgcatagcatacattcctcaggtccctccacgggttctcaacgacaatatacatttgtttcaagtattctacttcgtaccccgcgcatttgaaaccatccgatccgacgtcccctgagatccttgttccttacatcagacctgcagctcgactatgacaagcataactattatactataactatatattagaggaaaaagaatgactggataacggctctggatatctcaatttcttctaggcgatacaaaggaatggaaaaagggtcaacaacaaagagaagccaatagacgagtgaggctctgtgggggagacgtaagagccaagactacgcacctgggacagccctggaatgcccgatggcaaagaaatcagctgaacgtgtataatatatgaaaggaaacataatttccaggactatagactatagagggtttcaaattgatcaataatgcaaaatgctagttcactagatataaatacatctaatctgaggcttaataataattctcctcccagatgtacccgagcgcccgataaaaacatcaagctctctcaactcttatgccttcacaccccttggcttcttgaattggctatgtgcagcttgcaatctttgattcctgacatgggctgcttgcaggtttgagcaatgaggtcctcataatctccaacagtacgtattgcaaacactatcgttatcggagcaaacggactcggtctgacatatgaatctccagtggcttcacaccctgccaaagccggcccaggccaggcaatcctgcccctcattcccgacgacctcaaatccgcatcgtatcataatctcgcatctccatcagaacgccgagggaccaggaccgcccagtccactcctttgcacagtcgcgagtcctctgccgtccgaggaagacaagttgatccctccacgctcgcccctatccatcctcgacgcggtcattccggttccaagagccccgacgtatcgggcagtcgccctccaggatatgaagtggggttagagagacggccctccaactcgtatggtcaccaccggcagacctccatcgtacacggtatgcagcattcacgaaacaccagtatggccggatcaaccgcttccacgagccctttgagcccggagatcattgcttccctcggtcgcggtgcgtttgacgaggcgacccttcctgcgaaatttgatcctctcgagacgcactccggttattcgacaccgtccggaatatccgttagtcatgcgttgccgccaacattgagtacgatcaaagacaatgacacaacactgagggatgtgagtccggccgccatacttcacaaccgaatgaactcgggaggaaagccgagacgcgagcggtcagatagtcgttcacagtccaagcatcactcggaatcgaagacggttggggaatatgcattgcatcatctgttcaactcatttgtgggacaggcggacaacaagatcaaccaggccatcatgaagctgggggaatccgatgctcccgtggaggaggtttgcggcccaggagcagatccgactttcgatcaattgatatcggctttgggacatatcgctcggcagaagccgaaacctctgattgacacaattatgttctggcgcaaggctaagggtgatgctgctattacagcgagacagatgctgaatgagcaaagaccctcgtccgctgccacggaaaatgtccctctcctgcgccgcaacactgagccgacacagccggctgatcccactgcgactccagaacgggcgcagcaatcgatgccctttatgggtcgtcccgaggaagtcgctttgatagagcgacgcgcaacggtctcggtatatctagtctgtagagtcttgatcgagatcttccatcagagtagtctggcttcaatcactctggacatggcggatcgcttagaagacattgtgtttggccaggtgaaaacctctgacccggaccagatctcggcgtcacctctgcgaatggccaattggagaatctatggccagttgctgggtattatgagtgaatccaatttctccggcgttgcgaatcgttacttgatggaactggagcgctaccagaaggaggaagttacacgggggccatcccgcgaaagcgattcaaagtcggaattgttgatcctctgcatgcgatatctgcgtttgcctatgacttcagaagggtggccaaagtcttgtgatttcatgcgatcgttggcacgcttgtttgtgaatgctcatgggcagcgcatcaaacaggcatactgctacgtggttgaaaagcttcttctgcccgtcgctgccaacccaagctgcgatctttcactgcctcggtggaaggaattcgtggatttgatccaaccgcgcttaacacagcttcttatcaagcctcgtcattggacatcttccttctcgttgaatgtgctgttgctttgtatctccaacaaagagaccttttcttcacaatggcttcctatgatttcaagcttgcctgcacgtttgaaggaccgccctactcgtgcacccgccctccacgccatctgtcgtctggtttggacctatttcttccgcttctccgattcccccacaaccactcttcgcaaggtcgaagaggtggcaaagattgccctgccgactggcaagaaaacatacatgagtgcagagccggtctttgccgatccgttgatccagctgattcaaatcatcggtttcaagcatccggatgtctgtttccgtagcattattttccctttgatcaactcggatctgttcctatcgggcagagagttgaagatagaacagatggagccggagaaaatggttatcggaatccgcgcttttctggctacaatgtcggatctggagacaagtgaccaattatgccctccgatcccgactggctcgctcccgaatcctttcactgacgtctcaacccctgtgtatttccatcgaccccagctgctgaaagagtacaaagcgcctaatgcttctcagaagcaagacccgaccacatggcaacctgtcaataccgcgagactaagcgataatgtgaaggaatactatttccgattttgtgaagtcttaggcaagatcactttactctgtgataacacattcggcggccaagcagttctggacgagaagttcggcggaactacgcctaaaactccaatatcggaagctttcagcttcggtcgtcgtggtgatgaccatgttacaacactggaccagaagcaaggattctacgatttgctccatgtggcagtccaagcccttcctcgctgtctctctgaccacattccattcaactcactcatcaatcttctttgcacgggaactgcccacgtccagtcaaatatcgctacttcatcagcggagtcgttgaaggctattgcgcggcaattgcacgcccagcaagttacaatcggctttgctagattcatcttcaattttgatgagcgctactccactatgtcagacgaaggaatgcttggaccgggccatatcgagtccactctcagactatatgttgagttactgcaaatatggattgacgagattaaacaaaaaacaaaaggcgcggcagcgatggatcaactggagagatccatttctggcagccgagctctgcaccttgatttatcgagtgtcctcgcccatgtggaggagattgagtcacatggactctttttcttgtgttctcaatcaagacgtgttcgagcctttgccatcactgtcctgcggttgatcacggaatttgacagcgctctcggaaaagaaaacacaagaatcatccggatccttgaggctgattctcagcaaatcctagatgtgaatgatgagcatcttaccgtggcagagcgaagccgaatccaaaagggcagaagaagaagcgcctctcaaaatactcttatcgaactgtgcagcagtgaagtctcttatgattcaacattgtgggccaaggtatttccgaacatcatccgtgttagcttcgagacttgcccgttcgctgtcaccctaggaagggagattgtatgtgcacgccttcttcagatgcacgagattatcacgtctctcgccgagagcacaagatttccgcaatatgctcctatggatacgtaccagaatcgccccattgtaagaaccaatgtgacatctgaaatccttgtcgagcaatggaagctttacttggtcatggcatgcactactgtcaccagtgttggggctcaatcgcaaagccagctggcaaatgctcagcatgcgcgcaagacttccaagggaacccatcaatctcaagacaagatcagctccgctcgaagcctctttgcatttgttatccctctcctttctgctgaacgggattccatccgcagtgccatcgttgttgcgttggggtctattcatcaaaacctctatcgcacgctccttgagtctttgcagtatgccgtcactacttgcaacgaggaggcgaagatgagaattggcaaccactaccgcagtcctagcagcccccgccggaacaggaagactgatcgtttgcgcaccgaggtaacgaatgtttacaaactcacatctcacttccttcaagaccccgaggtttacaatgacgactggatcgtcaacaaccttgttacatacgcaaaagacattcgaattttcctaagtgatgccgaggttcagaacgactgggaattccagcgcttgcgattccatttctgcggactgatggaggagatctttgaaggtattaatcgtgctaaggatccttctcgctggatgcctttcgagtcgcggaagtctgctttctctcttatggaagactggtgtggatactcgccaaatcaatctcaaatctctgaaagagaggagaatatgcgcaagtttcgcatggcccggccacatgagactggtgaaatgaaaaataccgctgctgctatggagattgagaagaagaatctacgcgcggcagccttgagtgcaatggctttcctctgtgctggccccatcagcatcaccactgaaagtggttctgtcctccaattcgacgtcactcgcatgctttcatggattgaaatgatcttcaacactgtcagtgacaaatggcatgccatcggccgccgggctctgaagaacctcatcattcacaatcaggaacactcctatctgatggagcgatcaattgagatgtgctatgttaccgagcggcccaagaccattgagagctacttcgaagtggtgatgcaggtgctttttgaatatccggactatccactggaattctggagagttctaggagcagtcttggtgacactgggcaacgaaaaacgtgagatccgaatgaagtctgctaagcttctccgaaaacttgaggaacgccagcagaagaactccaggattcaagactttgatattagtatctcagacaagactaccgcagtgtacaagctggcccagttcgagatttcgaaaagattagctagtcagcattctgacttagcattcgctattttctcggagttttctttgcatttccgcgttcttggacctgatagccagcgaaatatggttgctgccatcctaccgtgggttcaaacgatggagctacaggttgacccgaatggcggccctacagccaagtcatacatgttgctcgcaaacctttttgagatcaccattcgttgcagttcagtcctgcctaaccaagtgcaagcactgtggcaggccttagcaacaggccctcacgggggtaatgtgcaactggtcctcgactttatcatcagcatctgtttggaacgcaaggagcaaaactttgtggattacgccaagcaaatggtcgtgttcttgtctgggactccagcaggatcaaaggtgatcgagttctttttgttgcaggttgtgccaaagaacatggtgcaagagcggaaagaactcactccacctcctcctgacatcgcaagtctgccatatgttgcagatcttggggtagtgctccctgtcggaaacaaacaagctggtctatcccttggacaggttgccctgatattcctcgttgatctgatggtcgctccggtgactctcgctctgagtgatgttgtcaagctgatccacatcgttctcatcctctgggatcattacacaatgactgtgcaggaacaagcccgtgagatgctggtacatcttatccacgaactgatagcggcgaaacttgaggacgatgccccggcgggtgcccggcaatcggtcgaagactttgtggaatcaatccgtaagagcgaccccgcggttgtttgggaatacgaagagaaccatagtaaagatgaagagatcgatgatcgccgggttcctgcatctatggctactgtcacccgtgaggtcgtcaggttctttagctttgcttacgaaggtgtcggcgatctgtgggccaaggaggcattgaactgggccacctcgtgtccagtacgacatttagcatgccgctccttccagattttccgctgtatctcgacatcattagattcgcggatgctagctgatatgctcgcccggctttcaaacaccattgcagacgaggaaacggattaccaaacattctcgatggagattcttactacgttgaagatcatcatcagctccctagcgccatcagatcttttggattatcctcagctcttctggacgacatgtgcttgtctcaacacaatccacgagactgagttcattgagagtattggcatgcttgagaaattcctcgaccgggtcgatctcagtgactcagttgtggtcgccaacctcatcgagggccagccaccaaactgggaaggcggctttgatggtatccaggaccttgtctttaagggaatgaaatcgtccgagtcctttgatcgtacgctcgatctgcttcatattcttagtggtcttccaaacaatgatctcatcggagatggaactcgacatctgtttactgtgttggctaacctgccccacttccttcaatgcttcaaggaagggttcaacgaccccaagcccatcgctcgtgccagcatacttgcccgcgtggctgagaatgagggatgccctcgcctcgcagcatctttgtttgggtttgccaatcagcagtacaagaccgccggggtcttcctcgaccatatcatcaccgagatcaagtcatactacttcccccagctggacttccagtgtctcatcttcctcatgggacttctcaccaacaccacggattggttccgcatcaaaaccatgaggatcctctgtgtgttgattcccgaggtggatatgcgacgcaatgaagtcacttgccatggcccagatctgatctccccactgctccggcttctgcaaaccgacctctgtcctcaggccctagaggttctggataatatcatcacggtctcggggaatccaatggagcgccaacatcttcggatgagtatggcgtcggcagcctcttctcgtgctatccgcaaagagtacgagcgaattcagagtctatacggaattcctgaaccgacgggatggtcggttcctatgcctgcaacccagtcaagcacgacccggcacaacgtccacgctgtcttctacacatgtgttgaagccgaagacaggcaagaggaagatgctaggacacctagcgtggccttccatgcggatgaatacagtgactcgttcttcccaatgagagctgatacgatgaaatcaatcgatacgcaggttgatggcaatatgggagatatcgtgcagaagctggacagcttagatgacttctttgaggatactgatacaatcactcctgtgctgaaccccatcgctcctccgatgctgcgaggattcactggtaactatgtggataccaacgcacatctgtatgatcagcagaccgcgccaattttgcgggaatcactcgctcggacaggttctacatcgtctttccataatggtcttgccgagtctcgccctcccaacatccgcttcgacggtccgggtgtgtactccccggtaacggcgataccccaaaacgcacagctactacgatccggttcccatacccgctctgtcacttcccctgccaacaacatgtatgcgcacacggcttccaatgcccccaattccacactgccggttgcattcggcgattccgctttactgtccgatgaggatccggacgaggtgcattcggacttagacgaacgcccggtaaccaagaagatgatcactccacctgcacccatgatccgcagtgcaactgatggaccacactccctggaatcaaggattcgcaacggcatgcggaggctgactggcggcgcagccaacagagaaaaagagcgacagcgggacctccttcgctcccaacaccgcgccattgtgcaaacggccaactcaccccgcgtccctaaggtacccgaggagtatctctcgggacctaccagtcacccggcatcaccgaggtgaggttggtacatatctttgcccttaacatacgtttctgctttgtcgtttcgctttttcttttctgttgtcagtccttttctaggctgcctgggcatttcttgggagtttggatcactttacatacataccccttactcgtccatctacttcgcgatcgatcttgtctatctagcgttgatccgcgcctctgcatcctgtacaatccatgtagtcagtcatatcctggaagttgatgggcttacatattaggtgtttgtcatttcaataccgaagtcaatacatttgaatttccaaggtcatgatgttgtcagagttcaagtttatgcgtctttatcaagaataccacgttgtatctatacattacgaagcgaagcgcagaacattaaggaggaccccctgccgagccgctataccgagaaaagttgccaactacgtccccgtgtatgcgaatgagttcctggcagttgaaacaaggtctgacaccctcttccatgtctctccacggagagaatcttggtattctgccgggcccaggtctttccactgcaaggaaatcccatacacgttgcggttttcttggaaaatatagcagtcacgaactactttttccgattcaggaaggaataacccatactaaatcatggagccgagcacccgtgttttcagtgactgtcgtcggctttctcccttcaagacagcaacgatttcaccgagcgtctccggtaaaagaatccgggccacttcttcagacatctggtagaccatgtagaatttcccactcgcctcaaaaaggacttccccccccctgagcatcgcacatgatagggatgcatttcccaagctcatatttagtagcgacatgatatccccaagaatctaccgctgcccattcaccctcgtagtcaagctcttccgggtccattgtccatcccggtggaggggacacctaggtacattatcagtatcacataatcgtgcgctcatctcagatgtttgacctacagaatattctctgcccaccatagcaatcggagtacggagtagtatggggggatctgcgtgatgtcaagccgggtgacccactcgagcggaatcttaattaccgccttcttaatggatgcaaccggcaattctgccaacatatcttccatggaatttatagtagaatcgaaattggcactttttcttatagcttcagggcaccaactaactgtggatgcgcacggggcatctttctcatgacaggcatttggagtacatcactgctcaatttgttattacctaggcagcactaaatcgagtacatacctagaggggaaaagtgactgtattatgtatatttttgggataattctaccctaagattggccatatcggtaagagtgactggaggtcgtcttaaacctaaaatttattgcttttcaagctatgaagatatactcattcacaattacgaggtctagatcggagaagcaaaggtccgtagtctttactggtccctcctttggagcccagaaagtcccttttgtcggggctggctggaattctgtctcaaagaagtcaatcttctctttatgtgccagagcaagatatcgacatttgtctcgtttttgtgggtcagcggaaactgtactggattggattcacaaatgatgcgtccggtagagcatgtagacttacccataagaagtttaattgggcagaacctcacttcatctttcacaatatctttcaggtctggttttctatagtgttgaagacctcgtcttcctttcgaccctcctcttttttcgggggatttgcatcaatatacaaagcccaacggagtacctttctaaatcaacgtcattcgcaggcatgcagaagaggttcatcgcctcagcactgaacggaattactacgccaaagaagatacgggatcggacattcataccgattaattgggaggcttgcatctaaaggagcgcgacactaaaacttgtgtcgcgctcattgccccacccaaacagctccagtgtccccactatccagtgtgtccttactatccagtgtgtccctactatctagtgtgtccctactctccagtgtgtcccctcctgcgggatcgtagacaatctataggttctactcctaagcctttgccttcttccatacgcggcattcttccatacggagatctcttccttatggggccttcttctatatgtagaattgatcattggaccgccaatctcagctatattctcgtaaagtaaattaaactattgggataatggttacataaaatctctgaccgaggataggaaaaacaaaggttctttcaggtaagagttccgcttcggtcttatgacttcatataggttgttgcggtgtatctttaccaacctgctgtacatcctggtctgtcactagcatcggggctggatagtaggagctcttgataggtcagtcatcttttcatcagagccatagtttgagacatactaattgtgagctgaggaaagcccagaatcccgaagtatccgctgataaaatatgtacctggcccgtctctcggatacgaattcccacgcacacatctgcgctgcacatcctactatattcgcatgcctttttcatcagacttgttttgcggcggcattgtttttgccgcatcaattttcttttcgaagtggtatccttggacttggtagccttgatagcggccattgggtgcgttgccttgatatctggaggtactttaacagtagagaagcctatataggtagcagggactctgaaaatttaggtccgctaatagaaaggggctcaatgaatataaatgttattgcacgaaggggagtctttaattatagagcgcgaaaagaccacgatattcaaagaccacgatattcttcaaattattgcacgcaaattggtcctttatatattgaactcataaaagtggccccgcaggacttgaagggcaatcaccagtgttatttgcggtcatcaaatgggtgcggcaacgggaaagcaaccgtaggcgcttatgtttacgtatcttgttcacattgcgcttttgcaccttgtaactattacgccaattccctatgtccggttaacaccgacggagtaaaaaattatcgattcataatctttatgataatggaatattcttaggggtctaaaatttcgggctatgaattttactatcacttgaattatatcaccttttaaaatttcgggctgtggattttacaatcacttgaattataccgcctcttaaaatttgcatgctgcaattttcctaaaggtcgaatattccgaacacaaaattttaaagggatcttttattcaggctcatttgaaattaccttcttaaagttcaagtcttattattttctcctcgattttatctacctgtctcggaaatttattatgtcccagttctaggaacgtcagaactactgcaaagggagagcgaaggtatacttgcaccatttccaaatagataatgtggggcctcgaactattcgagattcgcatatagcccggctggacagaatttttcagtcggaagggttttctcgcctgaacccagagaattatgtgaaggtccaatagcaatgatgttcttcagcaagctctgactgcccgatgaaactgaggccttcctaaacggcccattgaactttttaaaccccccaaatgaagtacggctgaatattgtgaacgatttatgttatatttgggcagttggactggaagcaaggctttttttggctggccctacaacggattatgcggatgaagagtcattagaatcttttctggcatggatcgacaaccaaagagccatgtgatactttctcagagaataagaaactgctacatagcagggcggtctatgtagaaactgctagataggagggaagtctatatagaaactgctacatagcagggcggtctatgtagaaactgctagataggagggaagtctatatagaaactgctacatagcagggcggtctatgtagaaactgctagataggagggaagtctatatagaaactgctacatagcagggcggtctatgtagaaactgctagataggagggaagtctatatagaaactgctacatagcagggcggtctatgtagaaactgctagataggagggaagtctatatagaaactgctacatagcagggcggtctatgtagaaactgctagataggagggaagtctatatagaaactgctacatagcagggcggtctatgtagaaactgctagataggagggaagtctatatagaaactgatagcactctagaagcgtagcgaattgccggggcatcctagaggcggtcggcagaatgcacaaaagagcccaatacagatagcgactacgaacataaacgcatttgagccttcgagcctttaatcagacacaagatataaataaacttccggcacagctttcaaatgacatataacactaagtaggaagctcgtgggcgttaagccgagttgtggtgtctaagcatgaggaagagaagctcgcgaccaatggtccacttgtaaaggagaagaaccttctatggatagcatcctaggtactcatgagatacccatttcaggacacgcatagacctatgctgcttgtaccaagagcatgatacagacaagacgtatggtgccccgaaagaattctaacagaagtggtgctgggatgaaagacagatcttgtatctatgatggagctatgtagagtatcctgtagggtgtgaaataagaggacgttaatgaaacaccactgctagttggaccatttcaagagcaaggtttccttggaaggccgagaacaaaagacttctttcgagagggttcaggtcatgggagaatcctcttgagaggaaataagtcacagtacggctaactgaagagcacatacgacacagaagggtaaacgtcatatgagctgggtcttcatgctatttctctcctaatccaattgttctgggcttgggctggttttgagatggtctagggcgaccacgaattgcggatggcggtttagccagacgccgttcagtgaggattgcgttcattggcttattatcttgctgtaggagcgggtctctgcagtagctttcattggacgacagtgtatgctgcggatgctagacccgcgttctcgtttcagagcctcagtgggcgcttatatacagccactgaaaccgtcccacgacgaagaaggcggtatcaaagggtgttttttttggcccgctctctgacttgactcgttatctcagtcaccccaccttctacttcccgctaaacgttggtacatacgcacagccgaatagcgggcaggaagatggaaagctgcttgcttcagttcgtgggggatcctgaaacggcgcccagaaatgaagttgtttggagactcatcaccagactcgatggagccgcctacgaaccgcctattcatttgtgggcaaagtgcaatccacccttcgtctcaacaccctgtatgattatgtctgctcccccccttcagacccattaagcctctaataacaactaacaaagaagcagtagttgatcaatttcaaaatgaagcatcaaaacaagatacgaagacagtccactgcctgcaaagaatgtcagcgtcggcggacaaaggtagggaatattacaatagtatagatcttctacttacttttcgttaaaatagtgcagtggtggaaatccgtgctcggaatgcacaaaacgcgactgtgtctgcgatgtcgatgagaactctgataaacgacgcaaactctacttaggtataatggaagaacttaggtaccatcaacaatttatggacgggttttttgaggcaatacggacttctgatgatgctaatgtccaccacattatcgatgttgtgcggtcgggatcattgaccagtgagatacagactgcagtgaatcgcattcttacggataatcgttcttcctacaatgacgtccctgaaggaggtccgttaagtgaccggcccaagaggaaggcttctaaatcggctacgtcggattatctcatagcccagctgctggatccaagcgaaattcaaagtgatggcgactcagcccagcaacctgttccgtaccccacgagctatcgcgtgctaccaaggaatatctcgagaagtctgagaatacagaaatgctttgcgaatgaggagcttccagatgatgttcgctttcagatgttttacgacgccggatatgttacgcgctactttggcgctattcatctaaaagaacagtcacctcaactgcaactggaggcatccttgctacataagatggcgttccggcgccatgcttttgatgtgcatcatgtgtgcagtcagtcgctggcgttgctcgaattcggtgtaggaacttcaaagacaagaataagcaggccatggtctcctgagcggcagtcaagtagggagatccggataaatataggtatacactgtcggcctcgttacgacactacttgatgcctaaccaattaaaaattggcatgaagcagactttcggggaatctcagtcataatatataattatccactgcagagatgctttcggagtcggctagcgttcgaatgcttcttcgcacagaaagggcatactcgcatgcaggaagcgattctgatctctgcattttccttgggccaatgctggtagtctttccgatgcgcaacacaatcgcaagcagggtgtatatctgtcgtattttccatgtggctgtcacgactgagaaggactgggaatgattggggacgattgaggacgattggggacgattggggacgattgagataatggctctaaagagcagttcatgcgataaattttaatctagtaggtgttaattagcaatatcgatgataagaagctaataaaagcacaaacggcttcgttcacaccgcgtatttgcgcaaactatcgcgtctatatgcagggatgcaggagagcagtgcttctccgcctaccctattaggttagattgtatttttcctatctgtgctgtagtcaggatacagtcactacgcaaaagtgttagcaccccagattctgccagtaaatattcaccaataaagggctaaggataatagacggaatatcaatttaaggaggcagtataataaattaggaaggcggtagtagaaggggtgttaatacttctgcggagtcactgtaggttaagaatccagacaagtgttccgcttccgaagatccacccccattagttgcccacgcatgctcgaattatgtgtgacttgataatccttgtagaccgttagatacgacacagcacaggactacacaacaattcacagaataacttcgaaaaagatggaatacaatttatgcgatagggcactttgaacattctgatttaacgtgctatgaaatatctggagtctctaatgtgaccctcacataaaatgtagtcaatggtacaaaatgtgcctttgtcgctgaaaggacaccatcggatggttgaaccgcctgaagagttctcaccgaaaccttccaccccagacgcaacttctttctatgccctttgtggattagtttccacttaaaggtagacatttgagtcatgactggccaattagtgaagaacaagttatcataaatacgcctagctacgtgtagagtaaggttctgggtaactaaatgcttccaagggcatcactggccagccaacaacctcaatctccacatcagtctgccacatgtggccgaacccttcatgattcagattgctttcaccaaagccaagagctcgccaaagcttgatgcgaaatatgaaacagtcagtcccaaactcgtcgaggtcataccagcgatcatctgcagagtccgcagttgatgtgtttgtctgcgggtcctccgctacaaagtcaggactagaaatgtcattcgattcgtcagtcatgtcattcgattcgtcagtcatgtcatgcgattcgtccgtcatgtcatccaattcgtcaggcaactcgtctgattcatcatgaacgtcgttatcctctggcaaacttccatacatattctcatccccagtatacaatcccatacaatagatatctgccgtgcatgggagagtctgaagctttgggaatactcttcgccactcggtgacaaaatcttgcatttggtctgactgcattagtacccttggttgatcgaaccagacgcttctgaggcacatgattttcaagttggatagtggacgcgcttgatgcatcagcaaaagagaaaggaacaatcgagcctccggcaagttcaaagaaacgagacgtggacagtaatgcgcgagatcaggaagcattgcaccattcattcgatacctgagccccaacgtaagcaattccacattgggtaatgcacgtaagagacctaggaactggggctgagagaggttttggtcccccatcctggcagatttatcatacacttcaaactttcgtaatagcgggcaacctcgcgcaatcttgagtagtgcttcagcatccgctagggcctcaaaggtcacgtcaacaatctgcaagtgacgacatttcgaaatcattctgattgcctgtccattgtgggcaggagagatatggtgcaaacagattatctgaagtttttcaaatctgggcaaatattctaaccaattttcatgcccccgtctaaggtggagtactttcaaatctggccatgggttttgagccagagatatcgatgcttgacttggatcgcagaaagttgtcctaagtgccagtgtttcgaggctcttctggtactgaaggtatggtaaaacttccccgagacttgattggacgggattgtttagccctcttggttcttcaaattggaagaaatgtaaattgcagtgtttcaggaggacacaaagctcattgaccgtttgatcaaaatcagacttataaattgtgagagccatgacattggcaaatttgttctattatggtggtaagtcatctttcaaagagctaatagggcgtgcaaaccaacatcaagtagggcattggagtgagccatcaaattcttgcagtaaatgttgtcaatagccaagtactccacagtgggggaaagaagaacatcagatatggatgaccaatcttgatctatgatctcgtatggaattataagactctgaaaacctcttccctgtggccgcaagagaagttctgtagattgccgatgacgcagcatgcgaggcttttcaaaggatgcaagtcgagtaggattcgcagcttcatccaacgccggtgtttctggcgcaagtaaaagatgtttgacaaagctaatattccgggcgaagcgggttcgcgacgctacatacaagctattcagtgatccaataccaggtgtacggagctgcatatcattgatggagcccgagtatagtttcttgagagcttctgcactccagacgctattgacacaagcacagttcaggagatctggagccgtgtgaacattgtcgatgacgagtgacatgatttctgggaggaggaaaggattatttacactgctttgaaggcatgcagccatggcgtatccataaaacgaaaaggaacggaacttaaaacgataaatgaaggttctcactcggtttgaaacaagaacgggacgtccccgaagataacatcacggtgtgaatccggcgctaactaaggaatattgatgactaaccttgtcaaagcggggttgcactagcctaggacccagccaaaacctttacgatgtcgacagcataacctcgtgcggagtccgacgcttaactacaccgatccagggtcgtgaacttagtatctagttgaccagggcccaaatattttaatctgtgataaaaaaaggtcgcgagcttaaaaattgtacgtacagtagcatcgccagttcacatatttgttaagatcagtgattggctggttgttttattgttgttggttgacttaatgagtcccctccactactcacccgccagaaccaggcgctttcccttccccgtgcgcatttgctgaaatccgatttacaccgaagccatttacccccctcatcaactttcaaggcgtggaaaaattctagcaaagtgacattcattcaatatctctcttagccatcaatcgatgagcgttattacccctgccaagatctcatcagcaatcccgcccgccataaatggaatcaacttatggcgtttgagatcccattccagaatctgacatacagtatccttgtggagagaatactggcatttaagtcgcctcaatggtatatgttgaattcatcatcgcgatactatcctgggtacgatacttctccccacctttgttacaatgcatctttttctttggtctttgcaacgctcaacaaattcctaggatactgtgtaaagctcaaaagcacctgcgaaacgatgtatttcgtaggggctaggaacaaagtaaaatgcaaggccattatttgatggccccacacatgaagaccccaggcgagacaatgtcctttggagtgaggagctcgggcgtgctctaatcatcgactttcaccgttctaccctgacatgtcgaccggctaggcagcgaccgggggccgcaaaacgacgactatatcaagtggaggcaggagatgcaaagcgtcttcgggtttcgtgataagaaaatctattttctacctgttaaattagcgattttgtgactcaaattctcatggtcacctatatatttcgaggcgaggtgcgctccttattcatgtgcatcaacaccacccgacttattatgtgagccggaccctcgaacttgagaactttttggaatgatatgaccattataagagcatagcagactgtcattcaattctgatattgcgacaaatgcaacagctgactgtataattgagggccgtttaagaggcccactgggagccaatctcaacactgcttttgccagcacaggtccacagaactgatatctctcataaatatggaagttattgcagtccagcattggccgcatgatgtaggatcgaccgaggtcaggcgagtgtggggtattttcgctattggctcgcatcgccgtggtattctttcaagattcacagattgggtgcggagagaccggagaggccaacgatgtcgacagatgggaggtcgaggcattcgcgaacaagcggccgagagtagatctggcacgccaagggctgtgcaatgaaacctctggtggggcctgagatggggcggatgaagcggagcattcaccaacaaggagaacaatttgggagacttcgcaacaagcaagggaggtcagcggaataacagacacccaacgggaaggcctcaccagcagaaagaaagcggtctagatgtctttgtagagttctttggaaaatggagtattgacacacaattatgcgatgcggtggatggctagatcaccccagtatttctactcctaagcaactgaatagcattacagcccacgctggtcagaacgaccagggagtcggatcgatctgcatctccggtaaactgaaaggggcagtgcgtcgggctgaaagcaaatgtgcagtagtcggtgggggccagagtaaaagaaagggggcggcgatgagtgcaagatagagaggtaggaagaatgaaaaagtgagagtaagggaggaggaccagtgaagacgggtctttatgtcaaagagcattgaagggaggttatgtgatggcgtattgaggcactaagcctaaaaaggcaaaactaaccggatagagtaattcacgggtccgccgtttacatgcaaaaaatgcattaattatgaagtcacggggaactggcatgtttgcactgtttatcaaagaatgggcccccaatgggcccccacgatgggccgtgggcccaaaaaaaaagcccaaagcccatcgtgggcccaagaaccgggcccaaagcccagcccattcgtgggttgggctgggttgggctttgggctttgtgggttctgcggaagcctatactatagatctctatactagcagcttattagctaaaaacactattactagtaccttttcaccggattccttgtctctataaaaaggaatcgcttctttctctcctctctaggaaagatttcctaacaattgagtatatcttcgcgaaactacctctatttcttaatcaggatattacctgatattatatgctctactatatagtctattttactccggcctactagaccactctttactcgttctctaggccctagatactttatatattttacccttttgcctgtcttttacctgttaacttaatgatagagtgctatatttttttatattattactagctttataggaagctctttcgaaagagatagatgatctcatgaagggtattggaaggtaagtcctgttattggtgggtcacgtgacctgtctactatttttagatacttgcccatctatagcttctcttcttcttcccttctctctttacacatatatacaattcctgtatagcctcattacgttccagtaagaccttctaagacagtgtcatcatctcgctccatagatgcaatttaatcttcaagtagattgtctaaagctgacacggttctttcaagctgacgacctgcttagcgattgactattgtattatacgtttgttagatcgcttttagagatcatatcgtaagaaatctaacgggatcccttcttttatctattatacgggcgaaaatcacggacgaaaacacctattaagtcttaggatcagactaaatgttaagatatataataccggtccgatattgcccagcttcatgctaccggcgatccttaacgatgccgggctcgggagtccttcagggcttcatatccgctgactcatcgggttctgactaagcggaccctgatcaaacttaattgaaacatttttaattaaaatctctcagggatcttccaaagtgaccgagtagacacagccggaagggatgaaggatccgtcgatttggctcaagctaaacaaccaagtttcacaccaattccaatgaatatctatagatccacattggtctcatttttttcaaaaatgccatgtaacaattcatgaatgtcgtataagaatatataagtgaccggctgaaaattttctggatccattccttgacttcgttctaaagttttaatattggaaaattccgtatctatatatgatgtctgtgtgagccatggtgatgactgtgactccgcttcgcagtgacaaattcaggctctgtactatcatcatcatgcgccaagccgatctcgttgagttgatcggccatctccttgaacggactatcttcctcgaagggatcgtcgctaagtgtgacatctgagtcgaggacagtatttgttagtcatgtctcatcaatcaattggttttgatcaacttacttgtaaccacccagttgtcagggtcattagggtccaaacctctggctgcgatggtagccgggggttcgaattggatcttgcagggcttgttttccagcatatcgaccttaagcgcaccaggggccttcttcttgtaagggtacacgaggcagatgccgttgttggtcagtgaaagttcagggtttccctggaggttgataccacccaaaacatggaggagtcctgtccctgggttcatggaaggattgttcgtggcacctgaggaaaatataccacctactgtcccgaggttgttctgggtgttcgtgtagctgaaaaggttcatggtgtagtatcttgtcggccctgtccatgacgagtccttccagtatttcgatgcggtttggcccgttggctgattaattagtaaacatttgatagatgctgccaggtacaaaaattttgactcacggtgtacttgatgtaagaaagttggccattgatcttagcttgatacttctgctgaccgtccggaacacatgcgacctcctaaaggacatcagattagttttcacgcaacaagtttcaaagagaataagatcagcttacagcgcctgtgcccccctctgctgctgagttgactggacgagtgtcgtgtcagtagatggccttgaatcaagtggatccagagtgcaatgttgacatacagggaaactcatcacaggacatggtcagcgcctggggctgttttccatccttgggccaaagggacctcttcaacttcgtacattccttcgatttctgagtacatgcgtcgacccggttagcatgcgttggatccggctgataggtcaggcgcatccaattgggccaaacatattgcttgcccgagttccggtccaggtatttcttgacattttcgcaaatgcccctgagatcgacgtgaggagtttgtccatttgtgtcagtgttgaggttgttgattctcgttgttgggaaccagtcacagttgtaaaacaacgccggtgggaggtagcaagttggtgcggtgttagcacgcttagcagttgacgaggtgtcttctgtatccaagcaactcaaggtttcgttagtaagttgagtattcttgttggcacattgacaccatccactaaagaaaggtgagccagttgtgtttttgaccagagccgagcttgttgaatcacgcttcctcttttcatccacatcactcgagtaagctagacattttttgtcaacaagtgcgatgggatcttctggagaggcgatctcatatcgatcaccccagtatgccacgtcgccaaggaatctgaggatttatcagttagcactgaccgggataaccaaaagccttcaagtagatataacttacgaggcatctgcttgcagaaataccgaataatcgtagtctgcccagtagcagaattctgcagaagacccgctcgatagacctgtcgacgccgaagcactaacacccaaactgacagtgttctcgactcccgcggtaaaatagccttccattaactttccattcagaacagaaataccgaatttgacctcaggggtaagagtcaaagccaagttgcccgatgccgacgctgaagcttcgaactgaggtgtgacggagaattgattcggggcatccttgccatcctcgtttttgagagaagacgggggaacactggcatcctcaccatctgaatcttgtgggaagaacacttctgctttagggaattccacaacaacaccagcgttaagttcacctgaaaccaccatcgaggcatccattttaccggaaagggcgagctctgggccgatgctgataagtcccttgatggaaagcccagggaatgtcacaccggagataatatcgatcttgtcgctgctggtctggaatgctgcttctcctcgcatggtcagaagaatctctgctgcaggagcaaccgaaaagtatgcataagaagaaatcaacttgggagtgggcaaaatcgcgccttcaaagtagtacgcgtattgcgcattgagacctatatcgagagtagaatcgatgtccagtgacatttgtttgccgctgcacttctcatcccaatggaacaacttgatcgtgtcatagtagttcagaggtaggtatccagagctgtttttgacaattgtggtgactttcttcagccattgcttgaaggcgccaaaccatctcttcctcttctggggtggatcctccgtaatatcctccctaacgacgatgaataatgttagtcgcgactaattttttttgacagtgagtcaccagtcatagcttaccagtagtcaagcaaattcgtatagtcgacccgaaagttgacgtctcccttctcctcctccgaagcggaagccaggtcataatccacagtgagttcatacgcctggtttgtgtcccgcggtaggatattactccgcttctctgaagagtgctgtggaaccaagctgatgacacgagcgtagggtccagatccgtggtaagaaggcatcttgacaatggtgtttgatgcaccaccggagaaaatggtcttacacccggtatcttcatcgaggctcgcacagcgaataatgtaagtctcaacgacgttgtcaaacgtgtcctcgcggaatgtgaagatgtctcgcttcttgcgtggaccgccatctctcttggagttgagacctccatcttccaaaaatgtccactgatccacaagagactcgtcgtatgcatccgtgtcaccatccaccatcacaaatgcgtaagggttctcttgctcgaagtcggatgattcgttgttgtcggtgtcctcgtgcttcaggtaatagctgtagtttttctcatctgggtactcaaatatggcggaggggtcgacgggagggttgacagttgaagtaggtgcatcacagcaaaacttgtacatgcctccttcatggcaatattgggggagactgccatttagtaaagctgagcgttgggtgaggagaactttgtcactagcgcaagactcggtacaagtagtccattcacaattctcgtaaccatcttgattcgtgaggtcccattagcggagttgctgcgaatgaggtgccataacttactgtcaaatgggcagcaaaaggtcgaaacctcacttccagagcagtactcagagtcttcgttgagatctaaaattctgtcagacgttcacattcctcttcaacgtggactcggggggaggtaagggggtgtgatggtgaggtgtgaagtgacttactagtgccgggcttgagagcatattccgggtactcaatatcagttttcatgcattctccgttgcaggcggtccagaaacacgagttcactatagtgtcaagattggggtcggtggcacagcaaagcgatcgactattgaccatgcacggggtagaccctgtccggtcagagtaagagtccttgacaatttcaaattcatttgagccacatgttttctcctttccaccagtacacatgccatcggatgagccgccagtccactggcatgtcggcattgcatctgttgggcaacagatcagacgatattctgagtctgaatcctcatattcggtcgtatcgccagttttgcaaagatgatcatcggggtcaatgatggttccgtaagaggctctgtgaacgtaatccaaaacactgtaacccgctttacatgatccagagttatagtccacgcatccagtgacataacaatcagtaccagtatattgattgtatgcatgtgctaatgccttggcactcagtgagttctcagatcctccttctagcagggaagcggagctgacatctttgttcagcagggcagttaaagcttgccagtcgtatgtatcctgatccaaggcccagatcatgactccgcctaggcattgatcattggcccaatcgaccttctgcttcattgtgacattgttgtcgtacgatacccactggttgtcgtcccaggtgacatacatgactgctgcagtttcctcccagatgggaccctggacatcaacattctcgacgatctccatgatctcattatatgagagaatcccagaagcatctgtacatcgaccaggctgccctcctccagtgaaggggcatccgacgccagtgcatgaagagtccttgagtgtgaaagatcgaccatagaaaccaatgcccaaaacaatctttgatggatcaacattgtttcgccaaagaaggtccatggattgttgaatctctgtcaagtttgtgtgcgctccagtgatattcccaatgtatgggtctgtgccatcccagacaccgtgaagatcgtaggtcatcatgttcgcccagtcggctccgtcttcttgcaaataggcgggcacgtcaaagtggcggagataccagtagctcgatggaatggtgaatgagattccaaggcttgaaccactgtcgtcaaaggttgagcgaacttgcttgatcaacttgccgtagttttccatgtcatccttgctgccaccacgatccgaagcgacaggatactcccagtccaagtcaacaccgtcaaagccgtattgctgcaacgtccgcaataagtctttggcgaatgactttcggccagattcagtagatgccatgtcagaccaatagtgcgccgaatcaccgtcattgaatgaccagccgccaacagacaagaagcacttcaaggacgggttgtcatctttcaaagcaatgaaatcagccaccatgtcattcaagttcgatatcttgtcctcatccatcaggtaaacattccagccatcattccagggtttgaaaagagcaaacgaccaatagatgtgtgtcaggctctgcacggggagattgcttggagaccatgaatcacatgtccgttcagcagaccagctctcataatagccaatgaccttcttgagaacgtcgttcgatttgcaggaaggctgcgttggttgatagcaattgctttggcacttgccgccgtctgtaccggcgttgcaaaactcggatgttgtaccgcagaaaccgaactcggagcagcaaacattcaatgggcaggtcgtgccagcagtggcagcccatttgccgcattctgcagttgcattgcagttgctcacgcatgtagagccacaagatttgtcgggatcatagccacaaagctgtatactttgggtcagcgaggcttaatggataagatagacaggcttaactaacgccattggtttcaccatcgttcacaccacagcatgcaccgttgacacatggacttgtcaagttgcagacatagaactgggccgatgtgaaatttataaagagtgaaagtataataaaagaaagtagaaagaaagaatggcaggacaagaactccgcccgcaaactgtatatcctcatggtgcggctctttcgtccgaaatactgaacaagtcagtaaaagcttgcccaggacgattcaagtcaaaggagaaagagaatgaatgagaaaagtaagaggaactaggatcataaagataacagacggggtccgaaatgaacagccgagactacctaagctcgcaacagtccggcagcctcaagtatccgacgctgatacagttcagtttggagtcccacaagtgtatctactaatctaatctactaatttaatccctcagcgcacgcaatactatttgtggactagacttgcaatttttactaggctagtcgtatctcgtgagaaaccgaatcccttcagagtttggaatggtcaatgtataccctgcataaccccaccggtgtactgtactagtatctcctatgggtgccgaatacatccggaccacctggtggcgccttaagttggccccctggttccaagcctcctgttacactacttcgtagcttcaaatcttgtaagcaatcacttcaaaaattttcatcggcggggcaaggcccggaagtttcagctgtgcagctcgcttagaacaaagcctgcattcaatggtttgtgcaatctctacagaatgcatccgatgtgaaaggtatactgttaattcctacattttacttggcattagagccgcatctgcatcctagcaagccaagctatagccaagaatgtaagcttcagccattgatctgtttgtctacaattcttttctatcgtctaagtccattattcttggcggacccatgtgaaaattttggcccccttggcccccaacatggggccctctaacacgttcaggggatctcggcccctacccgctaagtgggactggcttcgggacttgatgtatagggtaaagcttcacccacttttccacttgaatgggctgtctagtgctcaagccgaaccactttttcctgtacctcgcttagtggatttcgacggatgtctcagatttagcttggtactttgaacttccaatgggcctccccacttctagctccttttgataaggtggtaaattggttggtatgaaggcgtcaatacgaaacaccgaagtttccctgccgaacaagtagtttgagtagccattactccccctcctttgggattgctcatgtcccaggttcaaggaaaatcaattcgcgctctgaattctctttcagtcatagagctatggcactcttgagggcaagtgctgcattggcagtagttctgatgctacagtctcatcatgccgctgcttggggaaattcagacactctctacatttacaactctgatactctggctgatatatcagcttcagaagcatgcgtgaatgccatgtccagcaatgtttcatgctatgccggcttgagccaggcagtcacccagacgacatcatggtcagccaatgcactgtcggaaatgtgtaccagcggttgctcttccgctttgtcaagctatgtctcctctgtggacgaagcctgcggcacaagtacgcagtacaacatctccggtatctcacaaactgcctcggatagaggcaaagaaatgaaatggcgttacgatgcaacctgcttgactgattcggcttcgggcacctattgcaacaccctattccaaaatgcaatttcgaatggcacaacaaacatcaaatgcagcgcatgctatttggagtatttgtcaaccctagtgaattccaaatggggtcaggatattttgctcagtccgtcggccttaacgagtcaagtatcttcttgctcgaccagcggatactctgtgacttatacacgaacctcgactgcctcttccacggcctctgcctcggccactgttgccgctagtcgctgcaacacgactgaccccgatcaaactgtttacaaggttgaatccggagatacctgtctttctatctcagcagctcaaaatgtctcaacctcagccttgataaacttgaacagccttgatacggggtgtacgcatatagttgctggggcagagatttgccttcccgatgtttgtgagatctatcgcgttcaggagacggataccattgacaaaatcgttgcgagcctatcgcgtcaagtctctgtgcctcagtttgttgcatggaatgccaatctcaactcagcgcaaagctcgcagaatctgacggctgtttcggggaagtacatctgcgtcagtcctccgggtactctcacactccccgataccctggctcttaggcccgcaagcaccgctgtgtatgttgtctgctattttgtttcgctcggttgttcggaaagtgaaaatgctaatcaaatatacaggtctcttcctaccgacgcagtcgctagctccaacaccgactgtggtcactggtatcaggtccaagatggtgatacctgtgaatccgtgtgcgacaaattcagcatctctcaatataatttcaatttcttaaatccccaggccgcattgaatgcaacctccagttgcggcagcctctggaaagggaacagctacgtacgtctctctacacgagaaaataaccaagacatatcgttcttttcaggctaacccatccactccacagtgcgttcaagcagtgggtaacatcaacacctatacaagctacatatccaacaccacaagaacacgcacatcacttgctagcaccatgaatctcaacgcaacccgaacagcaaaccatagcaccaccaatctgttctggtcattcccttccgacctaaccacggcctcaacctggacccctgattcagcatacctcgcatctctcgcgacctacactctctgcgaccaggtcaactcagtgtacaacatcaccgatgacgatctaacagacgagatgtaccacgatgaagtctggctaagtgaatacgagcgcgtgtgctatcctcccgtgaacggttctttcccgaccaccgggttcaacttcagcattacattgaccgatgatccaagtatgggaagctcgacggtattcacttctagccaaacagctagccctcacgcatcatctacggtcactacggcgacctctaccacagttgcgactcctacgagtacgatttcggagaacggtctctgtggcccgtctaattcggactggacttgtttgggatctcaatttggtgactgctgtagtaactacggttattgtggtagttcgtcggagtattgttccagcgccaattgtaatgctaagtatggctcgtgtggttgatcttggtttgggggtgggacactcaatgccctagagttctaaagttcactgtcggacaaaattcggctatggtcttcaaggcatgtcaaatgtttatatatgccatattttcttctagttttaattactggaatatagaactgggatttaccagctggctgttaactggcacatagtagtgcatggaaacctggaatttatgaatatcaaactttcgcttacatttcaatgattttggcacaaatttacaactttacaaccagaattttgaaagcaagcggctaggccggaaaagacgctacttagtgcacaccaagtttgtgatcgatccacttcaacgaaaaccctttaagccaaagacccactccaggggtgtatatccgagctcgcaaccacttaatctcccctatcaaagcttagtcgtaaagattccaaggtcgcataatacaggtttagtgtgtttgagatgagtttgtacaggaacttttgaaaatataactagatttgatgccttagtgcaaacttggggcgggcatgtatcaaactccgttaaatacattcccgccccccacgttcctcactaaacttcttttcaacccccggaactaccaccattcgatcatgtccttaacaagatcacatagccagtggcctagaggcatcccctctttcattcgccgacatgaggaacccgtggcccggaagaattttgatgccgcctctcgtgcatggaggcattttgttcgtgagcagtgggtcggtggcgacggcgcggatcaacagaaacgagcgttgatcgaacgctgggcaacagcagaccaacaattccgcgatgtatgtcttttggataagaatttttatttttcactgacaccatgacagagctatcaatcacgagccccagaggacgagcctagtttttttgaaggtcctgaacttgcggtatgaaacaattaaatatatcctactacctgacttatcctaatccaagtataggataaaactttcggagccaatgacgttcaaagttcctgcatggtctacttctacaccaccgaattaacccccgagaaagaagccctgctcgccaagtgtatcctgggattattcccatgggaagacggctgggactttctagcagacgaaatgatagtatttgttccccctgaagacaataaggggaatgttctcgagacatttaaattccatcaaagtgtcgcgcgacccaacttcctcgatatgcacatggcgcttgatggaactgtacttttcagagactgctcccccaagcttattatcgatgaccggacccttgagaccggactaggtctctgggttgattttacaaccaacggtatctacgagatagcccgtcggggtcaaattatgatggaggaattcgcctacttttatcgggaaatcggtccgggaaatcgagtcccaatagaccaggcgctcaattacattgaggaccgggaaatttacatagaccgcgacgaagatgcagatccaagagagattttggaggatgaaccgtgagtctgtccattcttggttacgagatggtttatgttaattggtgcttagagtcgatatgcgacggccgcttgtggaaatctacaaagggaatgaagtcgatctggtggatgactatgcgccaggatttcgcgaggcggaggagcagggtgacggtttagcgatcggatttgatttggaaaggatacttgcgaacgatggaaatcccctgattgtcagagatcatggaagtgaccattagctagactttaccatgtactcctgaagtctcgttggttatttatatgggagatacggagtacataactggcaaccaccccttacctccggcagggatggagatctctaccgaatataccttgcccacggagcctccccaaagaatcaataattgggcacttgctgcaggtacccgtggactacagctacagtacggggtacggagtacattctcataccccggagcgattgataacatactaggtactatttatattgtaatatttcagctttttataggtagctgtaaactatttattatatttaaggtatatcatagtctgtttgttaggctggtaaagcttctgatattgaaggtccaagaaatgacgatattaatgataaggagaggaaggaggaagaagaagaagaagctatgaaagaagtaagctaaacagcaaggcaaacaaaacaagcaaagtgagcaaagcgagcaaagcaagcaaacagggcgcggggcagcaagcaagtaaacaaacgaatatataatgcttatagagcatgatactaccccctaataaagtaaaggtattagtcccttgatatcaaaataaccaaatcaattaatgatagtatgaattatcagaatcactcccttccaaatcaaccaatttagggtcaggaacaatagtagcattagtagtagtggcactaagagagatatctattacgtcagatctaccaccagagttactagttttactattttaactataggatataaagacgagatagaacttaatatttttaatactttattaggtaaaaagactatatatattctttagtatattctatatcgattataactataaagagatagcttttaataacgataaatagcgctagatcgactaacgtattcggtaagcgagctgcgcgcgcaaccgagctgcgcagcccaaaacacatagtaaatgcaagatattccacatttatatcttaacaaccatatgttcatcctatctccccgtttgtcgatagttattgataagacttcttagtactatatatcaatttcaaagagagtagaatactatcttaccatgatttcaaatattaccgaaaattacgtccctaaaagctagaaatatatatatcgtagttataaagccatttattttcctaaagttccctagatatactagatatcatatatatagtactatgctataaagacaagtccctatgagccactgttgttgagatatcaagttgtaatatatcgtatttactatgtgttttgggctgcgcagctcggttgcgcgcgcagctcacttaccgaatacgttagtcgatctagcgctatttatcgttattaaaagctatctctttatagttataatcgatatagaatatttatcttctttatcttataaagctattctataattatatacttactcttttaaagactcgagatataactatatatcttattttctagatctataatatattatttaagtatctagagaagtctattaattagctttaataaaagtatatactatagaaataataaatactttcctctcttaaggctagccgattaaagcttaataagtattatttataaataaattataagtatagttatatttatataattagtactatattagcgctagatagtcgattctaattctttctaaccgataattagataaaagaatagtataagatatatcgagctttattctaagatactcttaccccttactaagatcgttaagtaactagttaaggcctattagcctcttcttttagattaagactaaatatagttcttaataatctactttacgtaaagaaacctaaagcgaagccggttagggataagataacctaatatcttaatagtagtaagttaatcttattctaataattacttattacagagtacacaaagccgccctcaatgcttatattgaaacagatggctacggaggacgttgtatacagcgaaaggtcgacaggcgcgaaccaagaaatatcccgacagcatagcctctctcattggcgtttcttcggtcttccagaccgagagctggccttgtggcgtaatttggttgaatagtgaacttgaagggatgacatgtttcgacctgggaagtgagtcgtaatctcagactatgacattgcctctttttccttcagccgcacgagcagcgcattctcgtccgacgtgtatgtgtgtttccctgggataaccgccgtgtgcgctcgagacagcatcgggctaggatcgggtacgaaagtaaagaaatatgccggtttcagaccagtattagattcgaccgtgaggatagcactcccgcgtacaccctggatagcaccagagcaatgagatgaaataggaacggaagattccgaagggtcgaaaagtggcctgattgaaggtctccttttcttcctcttttgacacggctgtgctgtgtcataggtggtgttcccgtcttggtggatgctggtacctcgacctgagcggagtcgcttcttgcatactgccgcagcggcccttgtgcttgtcctggcggctccttgtttccaggacgttgacggtataaccacagctatcaacgggtagcgcaccgggggttcggaactaagcatcgtttaagctcgagaacattttaatgtagagcgagccgtcagcggggaggacggcctagatatggctggcgtatcttcaatagtgctgggatcttcagcccgccccgaagccttgtttgcccttgagtatggatcttcacctaggttagatgtctgactcggctccgaatcactttcgtagaccccactatctgagggctccatggtagataacttccgcttggctaattcttgccgaaaatcacccaccacagataggttgctagagacacagttcgcttattcgggtacaggcacggatggggtcacacagggtatgcaagagagttgagaagtctccatttctttggtatcaggaacagcgtctacaataaaaaaaagtcagacaatgagaggatgatggccgactttcaatatattgtgccaaattacccggtagaacatctcctcgcatatcaggaggaatagtatctaggtaatttggccctacaggacatagaattgttctcgcggagtctgtcgatagcactggctctaagaaagccagcgcggaacttccacgatccaacagaatatcacaggcagctggtatatctgttgtcactgggggtccgacatctttcgtcatttcaggcggagtgggtccgtagacatgattgatctcgaagtcaaacatgttccactcataagttgtaccggtcagtggcagtgactgtcctaggggtacctcacacggtcctagacagaagccgaacccagtaggaaaagactgctagaggtatcgtggctcatgagctggggcgtggttagggggcacgctttttgcactggtagaaagcggcgggcgacttgggccatggtagaactcgatttgatcaagatccaccctcatttcccagaaagtggtaagacacagcctagacacagcggaggtagaaaccaacagagaatgaagcaagcttaaataagagtacagcggtcactgggctagtgtatccacatccgttctaaatgatatccaaatcccttgatggatcaaagcttcaagactttcctagtcgataaatatgcgtatttagataattggaagcaccaattacaaaggcggttcaaattgcttgtttgattgggctttaggagcggggaaactagttgtacatgttatatttatgaaagcttctagctctcaatcaatgcatggaggatttgatttccagcgagaaaatgacaggcatggtttttccatcctaaagtttgttatttccagtagtgttaaggtatccccaatagactcctacgttattgtgcacactaaagataaagatcgcttccctaccatatacccatttatgatattatcatgccaaaaaacgccagatccagtagtgatataccaaagggaaagagaaatcgttggtgtctatggcaggggtagcccaagagcttgcaaaggtaagcaggagacagtcccatgcactctttctgcatggttcaggagtgccttttttgattctagatcttctccgcaaatattacacttgcagtgcatatcattcgggaacagcttgatatgcctattgacaaagtatcgattgagagaaccagggttcttatacattctcagacgctcattttcgggcagcccagaattaccaagacagataaagcagatcgttggtcgagacttttcagttttaacgcagacagaagcgatagcttgagaaaaagtatcgtctctattttctggaagagcagaattctgcctcttaggcatgggggcagcagcggctatgttacgaccccgagggtcacttgcacaactggcccgtatgggccgacgtacttgctaagtactcaaaatacctatagtagaagctgggtattatagggagatatacccctacctaccggctaagaaaactaaatataggatttataaacccctaccgagataggggctatacctactaaaagagctgctcctatagaagagagggctgcctaaccaatagaatcctccgataaggatattagagaaaataaaagaaggcttatagctaaatagcgagaccttaaggccctcgaaaaacagcttataattattaactagaaagccgaactcttactatacctttataactagaaccttatagctattgccttagaggaagaattaagtatactatacctactactacttaagggagatattacctaagtactagaatccctaaaccctatattaaggatactagtaataccttaaccttccctaatagtagtaggggactataataataatataggtatagtataaagtagtaaaacctcctaagttaaggaactataaagtctatctaatatactagtattctatagtaaaactatagataaataggatatatttaaggtaaaataagaagtattttaagtaagatacctataatagtttaccttagataaagtaagggttatataggtaatagaattcctcttaaataaggttacctagggttagatataatactaaaagaataatcctataaagtagattatataggatatattcgaaacttaggccttaacctaagttatagacctagtatagttatagtataaagtaaaagccgattaatagtaagctatatagaagctggaatagagtatatattaatatacctaatacctaatagggatctataaccacttacactctatactattagattaggtatatatcgactgcctagagataggtattttaagagagatctaaaccgaagcctaatagtaggacctacctaaaataaagatctataataattaggtagcctatcttagctttatagagagctaaatacctttatatactataaagctataggttaagcgatacctatataggtagaataggaatatagacttaaaggataatagtaagaagttattagactaaggctaggaactatctaccttataggatagctaaaaggagtagttattatcctctaataagaggaaataaggctaaggggtaaaattagataactagataaaggacttatattacttatataaggaagctagatatattataagaatttacctaaaagctaagtagctttagaagaataacttaaaggagctaaaaaaatagataaccctatactataggctataatagtactaggaataacccttagagagggttagtagaagggctaaagtatattagtatataatatacttatcttagatatttataagggtatcctaatagggattactagaattctaattaatagtagggctacttagacctttattagctaaagataggcaaaggagaatctagaagatataaaagggataccctatctagtaaaagtaattaataggtataaaatccacttatatagtagctaagagattactttctagcttatagatagtactagaagatatagtattataaagatatattataaggctattaatatattaggatataatatagtcttagggatagactaactctatatagtaaatctaaatattaactagagtactagctattagttatactataagggtaccttactagaaatagagatagtcttcttaaaagagtttaagaaggaactgtatctatataatatcttttatatactttatattagaccgctagatctattagaagaaggcaaatagttaggaactatatagatagataaccccttactataagtatatagagactttatagatatctttaataaagctctagctttaatcctactagaatatactatatataattatactattaacctaaagttaggaaaggtacctctatttaggttactatacttactatcgaatatagagttagaagtcctatatatctatattaataagaaccttaagagggactagatctaatatttaaagagccttataaaggtacctattctttttatactaaagaaggatagtaagcttcggctatatatagacttctatagattaaatataattattattaagaaccactacctcttacctttaattagtaaatccctattaagacttattagtataaaggtctatattaagctagaccttagagatatatactataggatctatattaagaaaggtaataaatagaaaatagtatttagaattaattatactataagggtaccctactagaaatagagatagtctccctaaaagagtttaagaaagaactatatttatatagtatcttttatatactttatattagactactagatctattagaagaagataaacggttaggaactatatagatagataactccctactataagtatatagagactttatagatatctttaataaagctttagctttaatcctactagaatatattatatataattatattatcgatctagaactaggaaaggtacccctatttaggttactatatttactattaaatatagaattagaagtcctatatacctatattaataagaaccttaagagggactagatctaatatttaaagagccctataaggatacctattctttttatattaaagaaggatagtaaactttagctatatatagacttctatagattaaatataattactattaagaactactattccttacccttaattaataaatccctattaagacttactagtataaaggtctatactaaactagaccttagagatatatactataggatctatattaagaaaggtaataaatagaaaacggtatttagaacctactatagatatttcgagtattatataatactatttaggcttataaatatacctataaccttctaagcttatataaataaggctcttataagattattagatatcttcctagtaatctacttaaataatatcttaatcttttcctaggataaggaatcttatatagaatatatataaatagtattagaatagctctactagtttaaactctatataaaggctttaaaatataccttctatacttcttaagtagagttccttagatttattatctctaataatagtatttctatagaccctacctaagtagaagtaattattacttagctaaagctagagtatatcttcgatatatagtaatttataggcttcgcgaacttttactataaatttattaaattatacttaaagattatagggctacttaatatattagtctaaggcctaaatatatagaagaaggggaagaataaaaagaagctaggcttctactttaataaaactataaggaaggctttttaagagattaaagagattttctaaaaagcccctttccttatatactttaactccctactaagaaccttagtagaatctaatatattaggtaaagtaattagagtaatctacttatagctataaaaagagagtagtacttagaaactaattatattcttcttatataagataagnnnnnnnnnnnnnnnnnnnnnnnnnnnnnnnnnnnnnnnnnnnnnnnnnnnnnnnnnnnnnnnnnnnnnnnnnnnnnnnnnnnnnnnnnnnnnnnnnnnnnnnnnnnnnnnnnnnnnnnnnnnnnnnnnnnnnnnnnnnnnnnnnnnnnnnnnnnnnnnnnnnnnnnnnnnnnnnnnnnnnnnnnnnnnnnnnnnnnnnnnnnnnnnnnnnnnnnnnnnnnnnnnnnnnnnnnnnnnnnnnnnnnnnnnnnnnnnnnnnnnnnnnnnnnnnnnnnnnnnnnnnnnnnnnnnnnnnnnnnnnnnnnnnnnnnnnnnnnnnnnnnnnnnnnnnnnnnnnnnnnnnnnnnnnnnnnnnnnnnnnnnnnnnnnnnnnnnnnnnnnnnnnnnnnnnnnnnnnnnnnnnnnnnnnnnnnnnnnnnnnnnnnnnnnnnnnnnnnnnnnnnnnnnnnnnnnnnnnnnnnnnnnnnnnnnnnnnnnnnnnnnnnnnnnnnnnnnnnnnnnnnnnnnnnnnnnnnnnnnnnnnnnnnnnnnnnnnnnnnnnnnnnnnnnnnnnnnnnnnnnnnnnnnnnnnnnnnnnnnnnnnnnnnnnnnnnnnnnnnnnnnnnnnnnnnnnnnnnnnnnnnnnnnnnnnnnnnnnnnnnnnnnnnnnnnnnnnnnnnnnnnnnnnnnnnnnnnnnnnnnnnnnnnnnnnnnnnnnnnnnnnnnnnnnnnnnnnnnnnnnnnnnnnnnnnnnnnnnnnnnnnnnnnnnnnnnnnnnnnnnnnnnnnnnnnnnnnnnnnnnnnnnnnnnnnnnnnnnnnnnnnnnnnnnnnnnnnnnnnnnnnnnnnnnnnnnnnnnnnnnnnnnnnnnnnnnnnnnnnnnnnnnnnnnnnnnnnnnnnnnnnnnnnnnnnnnnnnnnnnnnnnnnnnnnnnnnnnnnnnnnnnnnnnnnnnnnnnnnnnnnnnnnnnnnnnnnnnnnnnnnnnnnnnnnnnnnnnnnnnnnnnnnnnnnnnnnnnnnnnnnnnnnnnnnnnnnnnnnnnnnnnnnnnnnnnnnnnnnnnnnnnnnnnnnnnnnnnnnnnnnnnnnnnnnnnnnnnnnnnnnnnnnnnnnnnnnnnnnnnnnnnnnnnnnnnnnnnnnnnnnnnnnnnnnnnnnnnnnnnnnnnnnnnnnnnnnnnnnnnnnnnnnnnnnnnnnnnnnnnnnnnnnnnnnnnnnnnnnnnnnnnnnnnnnnnnnnnnnnnnnnnnnnnnnnnnnnnnnnnnnnnnnnnnnnnnnnnnnnnnnnnnnnnnnnnnnnnnnnnnnnnnnnnnnnnnnnnnnnnnnnnnnnnnnnnnnnnnnnnnnnnnnnnnnnnnnnnnnnnnnnnnnnnnnnnnnnnnnnnnnnnnnnnnnnnnnnnnnnnnnnnnnnnnnnnnnnnnnnnnnnnnnnnnnnnnnnnnnnnnnnnnnnnnnnnnnnnnnnnnnnnnnnnnnnnnnnnnnnnnnnnnnnnnnnnnnnnnnnnnnnnnnnnnnnnnnnnnnnnnnnnnnnnnnnnnnnnnnnnnnnnnnnnnnnnnnnnnnnnnnnnnnnnnnnnnnnnnnnnnnnnnnnnnnnnnnnnnnnnnnnnnnnnnnnnnnnnnnnnnnnnnnnnnnnnnnnnnnnnnnnnnnnnnnnnnnnnnnnnnnnnnnnnnnnnnnnnnnnnnnnnnnnnnnnnnnnnnnnnnnnnnnnnnnnnnnnnnnnnnnnnnnnnnnnnnnnnnnnnnnnnnnnnnnnnnnnnnnnnnnnnnnnnnnnnnnnnnnnnnnnnnnnnnnnnnnnnnnnnnnnnnnnnnnnnnnnnnnnnnnnnnnnnnnnnnnnnnnnnnnnnnnnnnnnnnnnnnnnnnnnnnnnnnnnnnnnnnnnnnnnnnnnnnnnnnnnnnnnnnnnnnnnnnnnnnnnnnnnnnnnnnnnnnnnnnnnnnnnnnnnnnnnnnnnnnnnnnnnnnnnnnnnnnnnnnnnnnnnnnnnnnnnnnnnnnnnnnnnnnnnnnnnnnnnnnnnnnnnnnnnnnnnnnnnnnnnnnnnnnnnnnnnnnnnnnnnnnnnnnnnnnnnnnnnnnnnnnnnnnnnnnnnnnnnnnnnnnnnnnnnnnnnnnnnnnnnnnnnnnnnnnnnnnnnnnnnnnnnnnnnnnnnnnnnnnnnnnnnnnnnnnnnnnnnnnnnnnnnnnnnnnnnnnnnnnnnnnnnnnnnnnnnnnnnnnnnnnnnnnnnnnnnnnnnnnnnnnnnnnnnnnnnnnnnnnnnnnnnnnnnnnnnnnnnnnnnnnnnnnnnnnnnnnnnnnnnnnnnnnnnnnnnnnnnnnnnnnnnnnnnnnnnnnnnnnnnnnnnnnnnnnnnnnnnnnnnnnnnnnnnnnnnnnnnnnnnnnnnnnnnnnnnnnnnnnnnnnnnnnnnnnnnnnnnnnnnnnnnnnnnnnnnnnnnnnnnnnnnnnnnnnnnnnnnnnnnnnnnnnnnnnnnnnnnnnnnnnnnnnnnnnnnnnnnnnnnnnnnnnnnnnnnnnnnnnnnnnnnnnnnnnnnnnnnnnnnnnnnnnnnnnnnnnnnnnnnnnnnnnnnnnnnnnnnnnnnnnnnnnnnnnnnnnnnnnnnnnnnnnnnnnnnnnnnnnnnnnnnnnnnnnnnnnnnnnnnnnnnnnnnnnnnnnnnnnnnnnnnnnnnnnnnnnnnnnnnnnnnnnnnnnnnnnnnnnnnnnnnnnnnnnnnnnnnnnnnnnnnnnnnnnnnnnnnnnnnnnnnnnnnnnnnnnnnnnnnnnnnnnnnnnnnnnnnnnnnnnnnnnnnnnnnnnnnnnnnnnnnnnnnnnnnnnnnnnnnnnnnnnnnnnnnnnnnnnnnnnnnnnnnnnnnnnnnnnnnnnnnnnnnnnnnnnnnnnnnnnnnnnnnnnnnnnnnnnnnnnnnnnnnnnnnnnnnnnnnnnnnnnnnnnnnnnnnnnnnnnnnnnnnnnnnnnnnnnnnnnnnnnnnnnnnnnnnnnnnnnnnnnnnnnnnnnnnnnnnnnnnnnnnnnnnnnnnnnnnnnnnnnnnnnnnnnnnnnnnnnnnnnnnnnnnnnnnnnnnnnnnnnnnnnnnnnnnnnnnnnnnnnnnnnnnnnnnnnnnnnnnnnnnnnnnnnnnnnnnnnnnnnnnnnnnnnnnnnnnnnnnnnnnnnnnnnnnnnnnnnnnnnnnnnnnnnnnnnnnnnnnnnnnnnnnnnnnnnnnnnnnnnnnnnnnnnnnnnnnnnnnnnnnnnnnnnnnnnnnnnnnnnnnnnnnnnnnnnnnnnnnnnnnnnnnnnnnnnnnnnnnnnnnnnnnnnnnnnnnnnnnnnnnnnnnnnnnnnnnnnnnnnnnnnnnnnnnnnnnnnnnnnnnnnnnnnnnnnnnnnnnnnnnnnnnnnnnnnnnnnnnnnnnnnnnnnnnnnnnnnnnnnnnnnnnnnnnnnnnnnnnnnnnnnnnnnnnnnnnnnnnnnnnnnnnnnnnnnnnnnnnnnnnnnnnnnnnnnnnnnnnnnnnnnnnnnnnnnnnnnnnnnnnnnnnnnnnnnnnnnnnnnnnnnnnnnnnnnnnnnnnnnnnnnnnnnnnnnnnnnnnnnnnnnnnnnnnnnnnnnnnnnnnnnnnnnnnnnnnnnnnnnnnnnnnnnnnnnnnnnnnnnnnnnnnnnnnnnnnnnnnnnnnnnnnnnnnnnnnnnnnnnnnnnnnnnnnnnnnnnnnnnnnnnnnnnnnnnnnnnnnnnnnnnnnnnnnnnnnnnnnnnnnnnnnnnnnnnnnnnnnnnnnnnnnnnnnnnnnnnnnnnnnnnnnnnnnnnnnnnnnnnnnnnnnnnnnnnnnnnnnnnnnnnnnnnnnnnnnnnnnnnnnnnnnnnnnnnnnnnnnnnnnnnnnnnnnnnnnnnnnnnnnnnnnnnnnnnnnnnnnnnnnnnnnnnnnnnnnnnnnnnnnnnnnnnnnnnnnnnnnnnnnnnnnnnnnnnnnnnnnnnnnnnnnnnnnnnnnnnnnnnnnnnnnnnnnnnnnnnnnnnnnnnnnnnnnnnnnnnnnnnnnnnnnnnnnnnnnnnnnnnnnnnnnnnnnnnnnnnnnnnnnnnnnnnnnnnnnnnnnnnnnnnnnnnnnnnnnnnnnnnnnnnnnnnnnnnnnnnnnnnnnnnnnnnnnnnnnnnnnnnnnnnnnnnnnnnnnnnnnnnnnnnnnnnnnnnnnnnnnnnnnnnnnnnnnnnnnnnnnnnnnnnnnnnnnnnnnnnnnnnnnnnnnnnnnnnnnnnnnnnnnnnnnnnnnnnnnnnnnnnnnnnnnnnnnnnnnnnnnnnnnnnnnnnnnnnnnnnnnnnnnnnnnnnnnnnnnnnnnnnnnnnnnnnnnnnnnnnnnnnnnnnnnnnnnnnnnnnnnnnnnnnnnnnnnnnnnnnnnnnnnnnnnnnnnnnnnnnnnnnnnnnnnnnnnnnnnnnnnnnnnnnnnnnnnnnnnnnnnnnnnnnnnnnnnnnnnnnnnnnnnnnnnnnnnnnnnnnnnnnnnnnnnnnnnnnnnnnnnnnnnnnnnnnnnnnnnnnnnnnnnnnnnnnnnnnnnnnnnnnnnnnnnnnnnnnnnnnnnnnnnnnnnnnnnnnnnnnnnnnnnnnnnnnnnnnnnnnnnnnnnnnnnnnnnnnnnnnnnnnnnnnnnnnnnnnnnnnnnnnnnnnnnnnnnnnnnnnnnnnnnnnnnnnnnnnnnnnnnnnnnnnnnnnnnnnnnnnnnnnnnnnnnnnnnnnnnnnnnnnnnnnnnnnnnnnnnnnnnnnnnnnnnnnnnnnnnnnnnnnnnnnnnnnnnnnnnnnnnnnnnnnnnnnnnnnnnnnnnnnnnnnnnnnnnnnnnnnnnnnnnnnnnnnnnnnnnnnnnnnnnnnnnnnnnnnnnnnnnnnnnnnnnnnnnnnnnnnnnnnnnnnnnnnnnnnnnnnnnnnnnnnnnnnnnnnnnnnnnnnnnnnnnnnnnnnnnnnnnnnnnnnnnnnnnnnnnnnnnnnnnnnnnnnnnnnnnnnnnnnnnnnnnnnnnnnnnnnnnnnnnnnnnnnnnnnnnnnnnnnnnnnnnnnnnnnnnnnnnnnnnnnnnnnnnnnnnnnnnnnnnnnnnnnnnnnnnnnnnnnnnnnnnnnnnnnnnnnnnnnnnnnnnnnnnnnnnnnnnnnnnnnnnnnnnnnnnnnnnnnnnnnnnnnnnnnnnnnnnnnnnnnnnnnnnnnnnnnnnnnnnnnnnnnnnnnnnnnnnnnnnnnnnnnnnnnnnnnnnnnnnnnnnnnnnnnnnnnnnnnnnnnnnnnnnnnnnnnnnnnnnnnnnnnnnnnnnnnnnnnnnnnnnnnnnnnnnnnnnnnnnnnnnnnnnnnnnnnnnnnnnnnnnnnnnnnnnnnnnnnnnnnnnnnnnnnnnnnnnnnnnnnnnnnnnnnnnnnnnnnnnnnnnnnnnnnnnnnnnnnnnnnnnnnnnnnnnnnnnnnnnnnnnnnnnnnnnnnnnnnnnnnnnnnnnnnnnnnnnnnnnnnnnnnnnnnnnnnnnnnnnnnnnnnnnnnnnnnnnnnnnnnnnnnnnnnnnnnnnnnnnnnnnnnnnnnnnnnnnnnnnnnnnnnnnnnnnnnnnnnnnnnnnnnnnnnnnnnnnnnnnnnnnnnnnnnnnnnnnnnnnnnnnnnnnnnnnnnnnnnnnnnnnnnnnnnnnnnnnnnnnnnnnnnnnnnnnnnnnnnnnnnnnnnnnnnnnnnnnnnnnnnnnnnnnnnnnnnnnnnnnnnnnnnnnnnnnnnnnnnnnnnnnnnnnnnnnnnnnnnnnnnnnnnnnnnnnnnnnnnnnnnnnnnnnnnnnnnnnnnnnnnnnnnnnnnnnnnnnnnnnnnnnnnnnnnnnnnnnnnnnnnnnnnnnnnnnnnnnnnnnnnnnnnnnnnnnnnnnnnnnnnnnnnnnnnnnnnnnnnnnnnnnnnnnnnnnnnnnnnnnnnnnnnnnnnnnnnnnnnnnnnnnnnnnnnnnnnnnnnnnnnnnnnnnnnnnnnnnnnnnnnnnnnnnnnnnnnnnnnnnnnnnnnnnnnnnnnnnnnnnnnnnnnnnnnnnnnnnnnnnnnnnnnnnnnnnnnnnnnnnnnnnnnnnnnnnnnnnnnnnnnnnnnnnnnnnnnnnnnnnnnnnnnnnnnnnnnnnnnnnnnnnnnnnnnnnnnnnnnnnnnnnnnnnnnnnnnnnnnnnnnnnnnnnnnnnnnnnnnnnnnnnnnnnnnnnnnnnnnnnnnnnnnnnnnnnnnnnnnnnnnnnnnnnnnnnnnnnnnnnnnnnnnnnnnnnnnnnnnnnnnnnnnnnnnnnnnnnnnnnnnnnnnnnnnnnnnnnnnnnnnnnnnnnnnnnnnnnnnnnnnnnnnnnnnnnnnnnnnnnnnnnnnnnnnnnnnnnnnnnnnnnnnnnnnnnnnnnnnnnnnnnnnnnnnnnnnnnnnnnnnnnnnnnnnnnnnnnnnnnnnnnnnnnnnnnnnnnnnnnnnnnnnnnnnnnnnnnnnnnnnnnnnnnnnnnnnnnnnnnnnnnnnnnnnnnnnnnnnnnnnnnnnnnnnnnnnnnnnnnnnnnnnnnnnnnnnnnnnnnnnnnnnnnnnnnnnnnnnnnnnnnnnnnnnnnnnnnnnnnnnnnnnnnnnnnnnnnnnnnnnnnnnnnnnnnnnnnnnnnnnnnnnnnnnnnnnnnnnnnnnnnnnnnnnnnnnnnnnnnnnnnnnnnnnnnnnnnnnnnnnnnnnnnnnnnnnnnnnnnnnnnnnnnnnnnnnnnnnnnnnnnnnnnnnnnnnnnnnnnnnnnnnnnnnnnnnnnnnnnnnnnnnnnnnnnnnnnnnnnnnnnnnnnnnnnnnnnnnnnnnnnnnnnnnnnnnnnnnnnnnnnnnnnnnnnnnnnnnnnnnnnnnnnnnnnnnnnnnnnnnnnnnnnnnnnnnnnnnnnnnnnnnnnnnnnnnnnnnnnnnnnnnnnnnnnnnnnnnnnnnnnnnnnnnnnnnnnnnnnnnnnnnnnnnnnnnnnnnnnnnnnnnnnnnnnnnnnnnnnnnnnnnnnnnnnnnnnnnnnnnnnnnnnnnnnnnnnnnnnnnnnnnnnnnnnnnnnnnnnnnnnnnnnnnnnnnnnnnnnnnnnnnnnnnnnnnnnnnnnnnnnnnnnnnnnnnnnnnnnnnnnnnnnnnnnnnnnnnnnnnnnnnnnnnnnnnnnnnnnnnnnnnnnnnnnnnnnnnnnnnnnnnnnnnnnnnnnnnnnnnnnnnnnnnnnnnnnnnnnnnnnnnnnnnnnnnnnnnnnnnnnnnnnnnnnnnnnnnnnnnnnnnnnnnnnnnnnnnnnnnnnnnnnnnnnnnnnnnnnnnnnnnnnnnnnnnnnnnnnnnnnnnnnnnnnnnnnnnnnnnnnnnnnnnnnnnnnnnnnnnnnnnnnnnnnnnnnnnnnnnnnnnnnnnnnnnnnnnnnnnnnnnnnnnnnnnnnnnnnnnnnnnnnnnnnnnnnnnnnnnnnnnnnnnnnnnnnnnnnnnnnnnnnnnnnnnnnnnnnnnnnnnnnnnnnnnnnnnnnnnnnnnnnnnnnnnnnnnnnnnnnnnnnnnnnnnnnnnnnnnnnnnnnnnnnnnnnnnnnnnnnnnnnnnnnnnnnnnnnnnnnnnnnnnnnnnnnnnnnnnnnnnnnnnnnnnnnnnnnnnnnnnnnnnnnnnnnnnnnnnnnnnnnnnnnnnnnnnnnnnnnnnnnnnnnnnnnnnnnnnnnnnnnnnnnnnnnnnnnnnnnnnnnnnnnnnnnnnnnnnnnnnnnnnnnnnnnnnnnnnnnnnnnnnnnnnnnnnnnnnnnnnnnnnnnnnnnnnnnnnnnnnnnnnnnnnnnnnnnnnnnnnnnnnnnnnnnnnnnnnnnnnnnnnnnnnnnnnnnnnnnnnnnnnnnnnnnnnnnnnnnnnnnnnnnnnnnnnnnnnnnnnnnnnnnnnnnnnnnnnnnnnnnnnnnnnnnnnnnnnnnnnnnnnnnnnnnnnnnnnnnnnnnnnnnnnnnnnnnnnnnnnnnnnnnnnnnnnnnnnnnnnnnnnnnnnnnnnnnnnnnnnnnnnnnnnnnnnnnnnnnnnnnnnnnnnnnnnnnnnnnnnnnnnnnnnnnnnnnnnnnnnnnnnnnnnnnnnnnnnnnnnnnnnnnnnnnnnnnnnnnnnnnnnnnnnnnnnnnnnnnnnnnnnnnnnnnnnnnnnnnnnnnnnnnnnnnnnnnnnnnnnnnnnnnnnnnnnnnnnnnnnnnnnnnnnnnnnnnnnnnnnnnnnnnnnnnnnnnnnnnnnnnnnnnnnnnnnnnnnnnnnnnnnnnnnnnnnnnnnnnnnnnnnnnnnnnnnnnnnnnnnnnnnnnnnnnnnnnnnnnnnnnnnnnnnnnnnnnnnnnnnnnnnnnnnnnnnnnnnnnnnnnnnnnnnnnnnnnnnnnnnnnnnnnnnnnnnnnnnnnnnnnnnnnnnnnnnnnnnnnnnnnnnnnnnnnnnnnnnnnnnnnnnnnnnnnnnnnnnnnnnnnnnnnnnnnnnnnnnnnnnnnnnnnnnnnnnnnnnnnnnnnnnnnnnnnnnnnnnnnnnnnnnnnnnnnnnnnnnnnnnnnnnnnnnnnnnnnnnnnnnnnnnnnnnnnnnnnnnnnnnnnnnnnnnnnnnnnnnnnnnnnnnnnnnnnnnnnnnnnnnnnnnnnnnnnnnnnnnnnnnnnnnnnnnnnnnnnnnnnnnnnnnnnnnnnnnnnnnnnnnnnnnnnnnnnnnnnnnnnnnnnnnnnnnnnnnnnnnnnnnnnnnnnnnnnnnnnnnnnnnnnnnnnnnnnnnnnnnnnnnnnnnnnnnnnnnnnnnnnnnnnnnnnnnnnnnnnnnnnnnnnnnnnnnnnnnnnnnnnnnnnnnnnnnnnnnnnnnnnnnnnnnnnnnnnnnnnnnnnnnnnnnnnnnnnnnnnnnnnnnnnnnnnnnnnnnnnnnnnnnnnnnnnnnnnnnnnnnnnnnnnnnnnnnnnnnnnnnnnnnnnnnnnnnnnnnnnnnnnnnnnnnnnnnnnnnnnnnnnnnnnnnnnnnnnnnnnnnnnnnnnnnnnnnnnnnnnnnnnnnnnnnnnnnnnnnnnnnnnnnnnnnnnnnnnnnnnnnnnnnnnnnnnnnnnnnnnnnnnnnnnnnnnnnnnnnnnnnnnnnnnnnnnnnnnnnnnnnnnnnnnnnnnnnnnnnnnnnnnnnnnnnnnnnnnnnnnnnnnnnnnnnnnnnnnnnnnnnnnnnnnnnnnnnnnnnnnnnnnnnnnnnnnnnnnnnnnnnnnnnnnnnnnnnnnnnnnnnnnnnnnnnnnnnnnnnnnnnnnnnnnnnnnnnnnnnnnnnnnnnnnnnnnnnnnnnnnnnnnnnnnnnnnnnnnnnnnnnnnnnnnnnnnnnnnnnnnnnnnnnnnnnnnnnnnnnnnnnnnnnnnnnnnnnnnnnnnnnnnnnnnnnnnnnnnnnnnnnnnnnnnnnnnnnnnnnnnnnnnnnnnnnnnnnnnnnnnnnnnnnnnnnnnnnnnnnnnnnnnnnnnnnnnnnnnnnnnnnnnnnnnnnnnnnnnnnnnnnnnnnnnnnnnnnnnnnnnnnnnnnnnnnnnnnnnnnnnnnnnnnnnnnnnnnnnnnnnnnnnnnnnnnnnnnnnnnnnnnnnnnnnnnnnnnnnnnnnnnnnnnnnnnnnnnnnnnnnnnnnnnnnnnnnnnnnnnnnnnnnnnnnnnnnnnnnnnnnnnnnnnnnnnnnnnnnnnnnnnnnnnnnnnnnnnnnnnnnnnnnnnnnnnnnnnnnnnnnnnnnnnnnnnnnnnnnnnnnnnnnnnnnnnnnnnnnnnnnnnnnnnnnnnnnnnnnnnnnnnnnnnnnnnnnnnnnnnnnnnnnnnnnnnnnnnnnnnnnnnnnnnnnnnnnnnnnnnnnnnnnnnnnnnnnnnnnnnnnnnnnnnnnnnnnnnnnnnnnnnnnnnnnnnnnnnnnnnnnnnnnnnnnnnnnnnnnnnnnnnnnnnnnnnnnnnnnnnnnnnnnnnnnnnnnnnnnnnnnnnnnnnnnnnnnnnnnnnnnnnnnnnnnnnnnnnnnnnnnnnnnnnnnnnnnnnnnnnnnnnnnnnnnnnnnnnnnnnnnnnnnnnnnnnnnnnnnnnnnnnnnnnnnnnnnnnnnnnnnnnnnnnnnnnnnnnnnnnnnnnnnnnnnnnnnnnnnnnnnnnnnnnnnnnnnnnnnnnnnnnnnnnnnnnnnnnnnnnnnnnnnnnnnnnnnnnnnnnnnnnnnnnnnnnnnnnnnnnnnnnnnnnnnnnnnnnnnnnnnnnnnnnnnnnnnnnnnnnnnnnnnnnnnnnnnnnnnnnnnnnnnnnnnnnnnnnnnnnnnnnnnnnnnnnnnnnnnnnnnnnnnnnnnnnnnnnnnnnnnnnnnnnnnnnnnnnnnnnnnnnnnnnnnnnnnnnnnnnnnnnnnnnnnnnnnnnnnnnnnnnnnnnnnnnnnnnnnnnnnnnnnnnnnnnnnnnnnnnnnnnnnnnnnnnnnnnnnnnnnnnnnnnnnnnnnnnnnnnnnnnnnnnnnnnnnnnnnnnnnnnnnnnnnnnnnnnnnnnnnnnnnnnnnnnnnnnnnnnnnnnnnnnnnnnnnnnnnnnnnnnnnnnnnnnnnnnnnnnnnnnnnnnnnnnnnnnnnnnnnnnnnnnnnnnnnnnnnnnnnnnnnnnnnnnnnnnnnnnnnnnnnnnnnnnnnnnnnnnnnnnnnnnnnnnnnnnnnnnnnnnnnnnnnnnnnnnnnnnnnnnnnnnnnnnnnnnnnnnnnnnnnnnnnnnnnnnnnnnnnnnnnnnnnnnnnnnnnnnnnnnnnnnnnnnnnnnnnnnnnnnnnnnnnnnnnnnnnnnnnnnnnnnnnnnnnnnnnnnnnnnnnnnnnnnnnnnnnnnnnnnnnnnnnnnnnnnnnnnnnnnnnnnnnnnnnnnnnnnnnnnnnnnnnnnnnnnnnnnnnnnnnnnnnnnnnnnnnnnnnnnnnnnnnnnnnnnnnnnnnnnnnnnnnnnnnnnnnnnnnnnnnnnnnnnnnnnnnnnnnnnnnnnnnnnnnnnnnnnnnnnnnnnnnnnnnnnnnnnnnnnnnnnnnnnnnnnnnnnnnnnnnnnnnnnnnnnnnnnnnnnnnnnnnnnnnnnnnnnnnnnnnnnnnnnnnnnnnnnnnnnnnnnnnnnnnnnnnnnnnnnnnnnnnnnnnnnnnnnnnnnnnnnnnnnnnnnnnnnnnnnnnnnnnnnnnnnnnnnnnnnnnnnnnnnnnnnnnnnnnnnnnnnnnnnnnnnnnnnnnnnnnnnnnnnnnnnnnnnnnnnnnnnnnnnnnnnnnnnnnnnnnnnnnnnnnnnnnnnnnnnnnnnnnnnnnnnnnnnnnnnnnnnnnnnnnnnnnnnnnnnnnnnnnnnnnnnnnnnnnnnnnnnnnnnnnnnnnnnnnnnnnnnnnnnnnnnnnnnnnnnnnnnnnnnnnnnnnnnnnnnnnnnnnnnnnnnnnnnnnnnnnnnnnnnnnnnnnnnnnnnnnnnnnnnnnnnnnnnnnnnnnnnnnnnnnnnnnnnnnnnnnnnnnnnnnnnnnnnnnnnnnnnnnnnnnnnnnnnnnnnnnnnnnnnnnnnnnnnnnnnnnnnnnnnnnnnnnnnnnnnnnnnnnnnnnnnnnnnnnnnnnnnnnnnnnnnnnnnnnnnnnnnnnnnnnnnnnnnnnnnnnnnnnnnnnnnnnnnnnnnnnnnnnnnnnnnnnnnnnnnnnnnnnnnnnnnnnnnnnnnnnnnnnnnnnnnnnnnnnnnnnnnnnnnnnnnnnnnnnnnnnnnnnnnnnnnnnnnnnnnnnnnnnnnnnnnnnnnnnnnnnnnnnnnnnnnnnnnnnnnnnnnnnnnnnnnnnnnnnnnnnnnnnnnnnnnnnnnnnnnnnnnnnnnnnnnnnnnnnnnnnnnnnnnnnnnnnnnnnnnnnnnnnnnnnnnnnnnnnnnnnnnnnnnnnnnnnnnnnnnnnnnnnnnnnnnnnnnnnnnnnnnnnnnnnnnnnnnnnnnnnnnnnnnnnnnnnnnnnnnnnnnnnnnnnnnnnnnnnnnnnnnnnnnnnnnnnnnnnnnnnnnnnnnnnnnnnnnnnnnnnnnnnnnnnnnnnnnnnnnnnnnnnnnnnnnnnnnnnnnnnnnnnnnnnnnnnnnnnnnnnnnnnnnnnnnnnnnnnnnnnnnnnnnnnnnnnnnnnnnnnnnnnnnnnnnnnnnnnnnnnnnnnnnnnnnnnnnnnnnnnnnnnnnnnnnnnnnnnnnnnnnnnnnnnnnnnnnnnnnnnnnnnnnnnnnnnnnnnnnnnnnnnnnnnnnnnnnnnnnnnnnnnnnnnnnnnnnnnnnnnnnnnnnnnnnnnnnnnnnnnnnnnnnnnnnnnnnnnnnnnnnnnnnnnnnnnnnnnnnnnnnnnnnnnnnnnnnnnnnnnnnnnnnnnnnnnnnnnnnnnnnnnnnnnnnnnnnnnnnnnnnnnnnnnnnnnnnnnnnnnnnnnnnnnnnnnnnnnnnnnnnnnnnnnnnnnnnnnnnnnnnnnnnnnnnnnnnnnnnnnnnnnnnnnnnnnnnnnnnnnnnnnnnnnnnnnnnnnnnnnnnnnnnnnnnnnnnnnnnnnnnnnnnnnnnnnnnnnnnnnnnnnnnnnnnnnnnnnnnnnnnnnnnnnnnnnnnnnnnnnnnnnnnnnnnnnnnnnnnnnnnnnnnnnnnnnnnnnnnnnnnnnnnnnnnnnnnnnnnnnnnnnnnnnnnnnnnnnnnnnnnnnnnnnnnnnnnnnnnnnnnnnnnnnnnnnnnnnnnnnnnnnnnnnnnnnnnnnnnnnnnnnnnnnnnnnnnnnnnnnnnnnnnnnnnnnnnnnnnnnnnnnnnnnnnnnnnnnnnnnnnnnnnnnnnnnnnnnnnnnnnnnnnnnnnnnnnnnnnnnnnnnnnnnnnnnnnnnnnnnnnnnnnnnnnnnnnnnnnnnnnnnnnnnnnnnnnnnnnnnnnnnnnnnnnnnnnnnnnnnnnnnnnnnnnnnnnnnnnnnnnnnnnnnnnnnnnnnnnnnnnnnnnnnnnnnnnnnnnnnnnnnnnnnnnnnnnnnnnnnnnnnnnnnnnnnnnnnnnnnnnnnnnnnnnnnnnnnnnnnnnnnnnnnnnnnnnnnnnnnnnnnnnnnnnnnnnnnnnnnnnnnnnnnnnnnnnnnnnnnnnnnnnnnnnnnnnnnnnnnnnnnnnnnnnnnnnnnnnnnnnnnnnnnnnnnnnnnnnnnnnnnnnnnnnnnnnnnnnnnnnnnnnnnnnnnnnnnnnnnnnnnnnnnnnnnnnnnnnnnnnnnnnnnnnnnnnnnnnnnnnnnnnnnnnnnnnnnnnnnnnnnnnnnnnnnnnnnnnnnnnnnnnnnnnnnnnnnnnnnnnnnnnnnnnnnnnnnnnnnnnnnnnnnnnnnnnnnnnnnnnnnnnnnnnnnnnnnnnnnnnnnnnnnnnnnnnnnnnnnnnnnnnnnnnnnnnnnnnnnnnnnnnnnnnnnnnnnnnnnnnnnnnnnnnnnnnnnnnnnnnnnnnnnnnnnnnnnnnnnnnnnnnnnnnnnnnnnnnnnnnnnnnnnnnnnnnnnnnnnnnnnnnnnnnnnnnnnnnnnnnnnnnnnnnnnnnnnnnnnnnnnnnnnnnnnnnnnnnnnnnnnnnnnnnnnnnnnnnnnnnnnnnnnnnnnnnnnnnnnnnnnnnnnnnnnnnnnnnnnnnnnnnnnnnnnnnnnnnnnnnnnnnnnnnnnnnnnnnnnnnnnnnnnnnnnnnnnnnnnnnnnnnnnnnnnnnnnnnnnnnnnnnnnnnnnnnnnnnnnnnnnnnnnnnnnnnnnnnnnnnnnnnnnnnnnnnnnnnnnnnnnnnnnnnnnnnnnnnnnnnnnnnnnnnnnnnnnnnnnnnnnnnnnnnnnnnnnnnnnnnnnnnnnnnnnnnnnnnnnnnnnnnnnnnnnnnnnnnnnnnnnnnnnnnnnnnnnnnnnnnnnnnnnnnnnnnnnnnnnnnnnnnnnnnnnnnnnnnnnnnnnnnnnnnnnnnnnnnnnnnnnnnnnnnnnnnnnnnnnnnnnnnnnnnnnnnnnnnnnnnnnnnnnnnnnnnnnnnnnnnnnnnnnnnnnnnnnnnnnnnnnnnnnnnnnnnnnnnnnnnnnnnnnnnnnnnnnnnnnnnnnnnnnnnnnnnnnnnnnnnnnnnnnnnnnnnnnnnnnnnnnnnnnnnnnnnnnnnnnnnnnnnnnnnnnnnnnnnnnnnnnnnnnnnnnnnnnnnnnnnnnnnnnnnnnnnnnnnnnnnnnnnnnnnnnnnnnnnnnnnnnnnnnnnnnnnnnnnnnnnnnnnnnnnnnnnnnnnnnnnnnnnnnnnnnnnnnnnnnnnnnnnnnnnnnnnnnnnnnnnnnnnnnnnnnnnnnnnnnnnnnnnnnnnnnnnnnnnnnnnnnnnnnnnnnnnnnnnnnnnnnnnnnnnnnnnnnnnnnnnnnnnnnnnnnnnnnnnnnnnnnnnnnnnnnnnnnnnnnnnnnnnnnnnnnnnnnnnnnnnnnnnnnnnnnnnnnnnnnnnnnnnnnnnnnnnnnnnnnnnnnnnnnnnnnnnnnnnnnnnnnnnnnnnnnnnnnnnnnnnnnnnnnnnnnnnnnnnnnnnnnnnnnnnnnnnnnnnnnnnnnnnnnnnnnnnnnnnnnnnnnnnnnnnnnnnnnnnnnnnnnnnnnnnnnnnnnnnnnnnnnnnnnnnnnnnnnnnnnnnnnnnnnnnnnnnnnnnnnnnnnnnnnnnnnnnnnnnnnnnnnnnnnnnnnnnnnnnnnnnnnnnnnnnnnnnnnnnnnnnnnnnnnnnnnnnnnnnnnnnnnnnnnnnnnnnnnnnnnnnnnnnnnnnnnnnnnnnnnnnnnnnnnnnnnnnnnnnnnnnnnnnnnnnnnnnnnnnnnnnnnnnnnnnnnnnnnnnnnnnnnnnnnnnnnnnnnnnnnnnnnnnnnnnnnnnnnnnnnnnnnnnnnnnnnnnnnnnnnnnnnnnnnnnnnnnnnnnnnnnnnnnnnnnnnnnnnnnnnnnnnnnnnnnnnnnnnnnnnnnnnnnnnnnnnnnnnnnnnnnnnnnnnnnnnnnnnnnnnnnnnnnnnnnnnnnnnnnnnnnnnnnnnnnnnnnnnnnnnnnnnnnnnnnnnnnnnnnnnnnnnnnnnnnnnnnnnnnnnnnnnnnnnnnnnnnnnnnnnnnnnnnnnnnnnnnnnnnnnnnnnnnnnnnnnnnnnnnnnnnnnnnnnnnnnnnnnnnnnnnnnnnnnnnnnnnnnnnnnnnnnnnnnnnnnnnnnnnnnnnnnnnnnnnnnnnnnnnnnnnnnnnnnnnnnnnnnnnnnnnnnnnnnnnnnnnnnnnnnnnnnnnnnnnnnnnnnnnnnnnnnnnnnnnnnnnnnnnnnnnnnnnnnnnnnnnnnnnnnnnnnnnnnnnnnnnnnnnnnnnnnnnnnnnnnnnnnnnnnnnnnnnnnnnnnnnnnnnnnnnnnnnnnnnnnnnnnnnnnnnnnnnnnnnnnnnnnnnnnnnnnnnnnnnnnnnnnnnnnnnnnnnnnnnnnnnnnnnnnnnnnnnnnnnnnnnnnnnnnnnnnnnnnnnnnnnnnnnnnnnnnnnnnnnnnnnnnnnnnnnnnnnnnnnnnnnnnnnnnnnnnnnnnnnnnnnnnnnnnnnnnnnnnnnnnnnnnnnnnnnnnnnnnnnnnnnnnnnnnnnnnnnnnnnnnnnnnnnnnnnnnnnnnnnnnnnnnnnnnnnnnnnnnnnnnnnnnnnnnnnnnnnnnnnnnnnnnnnnnnnnnnnnnnnnnnnnnnnnnnnnnnnnnnnnnnnnnnnnnnnnnnnnnnnnnnnnnnnnnnnnnnnnnnnnnnnnnnnnnnnnnnnnnnnnnnnnnnnnnnnnnnnnnnnnnnnnnnnnnnnnnnnnnnnnnnnnnnnnnnnnnnnnnnnnnnnnnnnnnnnnnnnnnnnnnnnnnnnnnnnnnnnnnnnnnnnnnnnnnnnnnnnnnnnnnnnnnnnnnnnnnnnnnnnnnnnnnnnnnnnnnnnnnnnnnnnnnnnnnnnnnnnnnnnnnnnnnnnnnnnnnnnnnnnnnnnnnnnnnnnnnnnnnnnnnnnnnnnnnnnnnnnnnnnnnnnnnnnnnnnnnnnnnnnnnnnnnnnnnnnnnnnnnnnnnnnnnnnnnnnnnnnnnnnnnnnnnnnnnnnnnnnnnnnnnnnnnnnnnnnnnnnnnnnnnnnnnnnnnnnnnnnnnnnnnnnnnnnnnnnnnnnnnnnnnnnnnnnnnnnnnnnnnnnnnnnnnnnnnnnnnnnnnnnnnnnnnnnnnnnnnnnnnnnnnnnnnnnnnnnnnnnnnnnnnnnnnnnnnnnnnnnnnnnnnnnnnnnnnnnnnnnnnnnnnnnnnnnnnnnnnnnnnnnnnnnnnnnnnnnnnnnnnnnnnnnnnnnnnnnnnnnnnnnnnnnnnnnnnnnnnnnnnnnnnnnnnnnnnnnnnnnnnnnnnnnnnnnnnnnnnnnnnnnnnnnnnnnnnnnnnnnnnnnnnnnnnnnnnnnnnnnnnnnnnnnnnnnnnnnnnnnnnnnnnnnnnnnnnnnnnnnnnnnnnnnnnnnnnnnnnnnnnnnnnnnnnnnnnnnnnnnnnnnnnnnnnnnnnnnnnnnnnnnnnnnnnnnnnnnnnnnnnnnnnnnnnnnnnnnnnnnnnnnnnnnnnnnnnnnnnnnnnnnnnnnnnnnnnnnnnnnnnnnnnnnnnnnnnnnnnnnnnnnnnnnnnnnnnnnnnnnnnnnnnnnnnnnnnnnnnnnnnnnnnnnnnnnnnnnnnnnnnnnnnnnnnnnnnnnnnnnnnnnnnnnnnnnnnnnnnnnnnnnnnnnnnnnnnnnnnnnnnnnnnnnnnnnnnnnnnnnnnnnnnnnnnnnnnnnnnnnnnnnnnnnnnnnnnnnnnnnnnnnnnnnnnnnnnnnnnnnnnnnnnnnnnnnnnnnnnnnnnnnnnnnnnnnnnnnnnnnnnnnnnnnnnnnnnnnnnnnnnnnnnnnnnnnnnnnnnnnnnnnnnnnnnnnnnnnnnnnnnnnnnnnnnnnnnnnnnnnnnnnnnnnnnnnnnnnnnnnnnnnnnnnnnnnnnnnnnnnnnnnnnnnnnnnnnnnnnnnnnnnnnnnnnnnnnnnnnnnnnnnnnnnnnnnnnnnnnnnnnnnnnnnnnnnnnnnnnnnnnnnnnnnnnnnnnnnnnnnnnnnnnnnnnnnnnnnnnnnnnnnnnnnnnnnnnnnnnnnnnnnnnnnnnnnnnnnnnnnnnnnnnnnnnnnnnnnnnnnnnnnnnnnnnnnnnnnnnnnnnnnnnnnnnnnnnnnnnnnnnnnnnnnnnnnnnnnnnnnnnnnnnnnnnnnnnnnnnnnnnnnnnnnnnnnnnnnnnnnnnnnnnnnnnnnnnnnnnnnnnnnnnnnnnnnnnnnnnnnnnnnnnnnnnnnnnnnnnnnnnnnnnnnnnnnnnnnnnnnnnnnnnnnnnnnnnnnnnnnnnnnnnnnnnnnnnnnnnnnnnnnnnnnnnnnnnnnnnnnnnnnnnnnnnnnnnnnnnnnnnnnnnnnnnnnnnnnnnnnnnnnnnnnnnnnnnnnnnnnnnnnnnnnnnnnnnnnnnnnnnnnnnnnnnnnnnnnnnnnnnnnnnnnnnnnnnnnnnnnnnnnnnnnnnnnnnnnnnnnnnnnnnnnnnnnnnnnnnnnnnnnnnnnnnnnnnnnnnnnnnnnnnnnnnnnnnnnnnnnnnnnnnnnnnnnnnnnnnnnnnnnnnnnnnnnnnnnnnnnnnnnnnnnnnnnnnnnnnnnnnnnnnnnnnnnnnnnnnnnnnnnnnnnnnnnnnnnnnnnnnnnnnnnnnnnnnnnnnnnnnnnnnnnnnnnnnnnnnnnnnnnnnnnnnnnnnnnnnnnnnnnnnnnnnnnnnnnnnnnnnnnnnnnnnnnnnnnnnnnnnnnnnnnnnnnnnnnnnnnnnnnnnnnnnnnnnnnnnnnnnnnnnnnnnnnnnnnnnnnnnnnnnnnnnnnnnnnnnnnnnnnnnnnnnnnnnnnnnnnnnnnnnnnnnnnnnnnnnnnnnnnnnnnnnnnnnnnnnnnnnnnnnnnnnnnnnnnnnnnnnnnnnnnnnnnnnnnnnnnnnnnnnnnnnnnnnnnnnnnnnnnnnnnnnnnnnnnnnnnnnnnnnnnnnnnnnnnnnnnnnnnnnnnnnnnnnnnnnnnnnnnnnnnnnnnnnnnnnnnnnnnnnnnnnnnnnnnnnnnnnnnnnnnnnnnnnnnnnnnnnnnnnnnnnnnnnnnnnnnnnnnnnnnnnnnnnnnnnnnnnnnnnnnnnnnnnnnnnnnnnnnnnnnnnnnnnnnnnnnnnnnnnnnnnnnnnnnnnnnnnnnnnnnnnnnnnnnnnnnnnnnnnnnnnnnnnnnnnnnnnnnnnnnnnnnnnnnnnnnnnnnnnnnnnnnnnnnnnnnnnnnnnnnnnnnnnnnnnnnnnnnnnnnnnnnnnnnnnnnnnnnnnnnnnnnnnnnnnnnnnnnnnnnnnnnnnnnnnnnnnnnnnnnnnnnnnnnnnnnnnnnnnnnnnnnnnnnnnnnnnnnnnnnnnnnnnnnnnnnnnnnnnnnnnnnnnnnnnnnnnnnnnnnnnnnnnnnnnnnnnnnnnnnnnnnnnnnnnnnnnnnnnnnnnnnnnnnnnnnnnnnnnnnnnnnnnnnnnnnnnnnnnnnnnnnnnnnnnnnnnnnnnnnnnnnnnnnnnnnnnnnnnnnnnnnnnnnnnnnnnnnnnnnnnnnnnnnnnnnnnnnnnnnnnnnnnnnnnnnnnnnnnnnnnnnnnnnnnnnnnnnnnnnnnnnnnnnnnnnnnnnnnnnnnnnnnnnnnnnnnnnnnnnnnnnnnnnnnnnnnnnnnnnnnnnnnnnnnnnnnnnnnnnnnnnnnnnnnnnnnnnnnnnnnnnnnnnnnnnnnnnnnnnnnnnnnnnnnnnnnnnnnnnnnnnnnnnnnnnnnnnnnnnnnnnnnnnnnnnnnnnnnnnnnnnnnnnnnnnnnnnnnnnnnnnnnnnnnnnnnnnnnnnnnnnnnnnnnnnnnnnnnnnnnnnnnnnnnnnnnnnnnnnnnnnnnnnnnnnnnnnnnnnnnnnnnnnnnnnnnnnnnnnnnnnnnnnnnnnnnnnnnnnnnnnnnnnnnnnnnnnnnnnnnnnnnnnnnnnnnnnnnnnnnnnnnnnnnnnnnnnnnnnnnnnnnnnnnnnnnnnnnnnnnnnnnnnnnnnnnnnnnnnnnnnnnnnnnnnnnnnnnnnnnnnnnnnnnnnnnnnnnnnnnnnnnnnnnnnnnnnnnnnnnnnnnnnnnnnnnnnnnnnnnnnnnnnnnnnnnnnnnnnnnnnnnnnnnnnnnnnnnnnnnnnnnnnnnnnnnnnnnnnnnnnnnnnnnnnnnnnnnnnnnnnnnnnnnnnnnnnnnnnnnnnnnnnnnnnnnnnnnnnnnnnnnnnnnnnnnnnnnnnnnnnnnnnnnnnnnnnnnnnnnnnnnnnnnnnnnnnnnnnnnnnnnnnnnnnnnnnnnnnnnnnnnnnnnnnnnnnnnnnnnnnnnnnnnnnnnnnnnnnnnnnnnnnnnnnnnnnnnnnnnnnnnnnnnnnnnnnnnnnnnnnnnnnnnnnnnnnnnnnnnnnnnnnnnnnnnnnnnnnnnnnnnnnnnnnnnnnnnnnnnnnnnnnnnnnnnnnnnnnnnnnnnnnnnnnnnnnnnnnnnnnnnnnnnnnnnnnnnnnnnnnnnnnnnnnnnnnnnnnnnnnnnnnnnnnnnnnnnnnnnnnnnnnnnnnnnnnnnnnnnnnnnnnnnnnnnnnnnnnnnnnnnnnnnnnnnnnnnnnnnnnnnnnnnnnnnnnnnnnnnnnnnnnnnnnnnnnnnnnnnnnnnnnnnnnnnnnnnnnnnnnnnnnnnnnnnnnnnnnnnnnnnnnnnnnnnnnnnnnnnnnnnnnnnnnnnnnnnnnnnnnnnnnnnnnnnnnnnnnnnnnnnnnnnnnnnnnnnnnnnnnnnnnnnnnnnnnnnnnnnnnnnnnnnnnnnnnnnnnnnnnnnnnnnnnnnnnnnnnnnnnnnnnnnnnnnnnnnnnnnnnnnnnnnnnnnnnnnnnnnnnnnnnnnnnnnnnnnnnnnnnnnnnnnnnnnnnnnnnnnnnnnnnnnnnnnnnnnnnnnnnnnnnnnnnnnnnnnnnnnnnnnnnnnnnnnnnnnnnnnnnnnnnnnnnnnnnnnnnnnnnnnnnnnnnnnnnnnnnnnnnnnnnnnnnnnnnnnnnnnnnnnnnnnnnnnnnnnnnnnnnnnnnnnnnnnnnnnnnnnnnnnnnnnnnnnnnnnnnnnnnnnnnnnnnnnnnnnnnnnnnnnnnnnnnnnnnnnnnnnnnnnnnnnnnnnnnnnnnnnnnnnnnnnnnnnnnnnnnnnnnnnnnnnnnnnnnnnnnnnnnnnnnnnnnnnnnnnnnnnnnnnnnnnnnnnnnnnnnnnnnnnnnnnnnnnnnnnnnnnnnnnnnnnnnnnnnnnnnnnnnnnnnnnnnnnnnnnnnnnnnnnnnnnnnnnnnnnnnnnnnnnnnnnnnnnnnnnnnnnnnnnnnnnnnnnnnnnnnnnnnnnnnnnnnnnnnnnnnnnnnnnnnnnnnnnnnnnnnnnnnnnnnnnnnnnnnnnnnnnnnnnnnnnnnnnnnnnnnnnnnnnnnnnnnnnnnnnnnnnnnnnnnnnnnnnnnnnnnnnnnnnnnnnnnnnnnnnnnnnnnnnnnnnnnnnnnnnnnnnnnnnnnnnnnnnnnnnnnnnnnnnnnnnnnnnnnnnnnnnnnnnnnnnnnnnnnnnnnnnnnnnnnnnnnnnnnnnnnnnnnnnnnnnnnnnnnnnnnnnnnnnnnnnnnnnnnnnnnnnnnnnnnnnnnnnnnnnnnnnnnnnnnnnnnnnnnnnnnnnnnnnnnnnnnnnnnnnnnnnnnnnnnnnnnnnnnnnnnnnnnnnnnnnnnnnnnnnnnnnnnnnnnnnnnnnnnnnnnnnnnnnnnnnnnnnnnnnnnnnnnnnnnnnnnnnnnnnnnnnnnnnnnnnnnnnnnnnnnnnnnnnnnnnnnnnnnnnnnnnnnnnnnnnnnnnnnnnnnnnnnnnnnnnnnnnnnnnnnnnnnnnnnnnnnnnnnnnnnnnnnnnnnnnnnnnnnnnnnnnnnnnnnnnnnnnnnnnnnnnnnnnnnnnnnnnnnnnnnnnnnnnnnnnnnnnnnnnnnnnnnnnnnnnnnnnnnnnnnnnnnnnnnnnnnnnnnnnnnnnnnnnnnnnnnnnnnnnnnnnnnnnnnnnnnnnnnnnnnnnnnnnnnnnnnnnnnnnnnnnnnnnnnnnnnnnnnnnnnnnnnnnnnnnnnnnnnnnnnnnnnnnnnnnnnnnnnnnnnnnnnnnnnnnnnnnnnnnnnnnnnnnnnnnnnnnnnnnnnnnnnnnnnnnnnnnnnnnnnnnnnnnnnnnnnnnnnnnnnnnnnnnnnnnnnnnnnnnnnnnnnnnnnnnnnnnnnnnnnnnnnnnnnnnnnnnnnnnnnnnnnnnnnnnnnnnnnnnnnnnnnnnnnnnnnnnnnnnnnnnnnnnnnnnnnnnnnnnnnnnnnnnnnnnnnnnnnnnnnnnnnnnnnnnnnnnnnnnnnnnnnnnnnnnnnnnnnnnnnnnnnnnnnnnnnnnnnnnnnnnnnnnnnnnnnnnnnnnnnnnnnnnnnnnnnnnnnnnnnnnnnnnnnnnnnnnnnnnnnnnnnnnnnnnnnnnnnnnnnnnnnnnnnnnnnnnnnnnnnnnnnnnnnnnnnnnnnnnnnnnnnnnnnnnnnnnnnnnnnnnnnnnnnnnnnnnnnnnnnnnnnnnnnnnnnnnnnnnnnnnnnnnnnnnnnnnnnnnnnnnnnnnnnnnnnnnnnnnnnnnnnnnnnnnnnnnnnnnnnnnnnnnnnnnnnnnnnnnnnnnnnnnnnnnnnnnnnnnnnnnnnnnnnnnnnnnnnnnnnnnnnnnnnnnnnnnnnnnnnnnnnnnnnnnnnnnnnnnnnnnnnnnnnnnnnnnnnnnnnnnnnnnnnnnnnnnnnnnnnnnnnnnnnnnnnnnnnnnnnnnnnnnnnnnnnnnnnnnnnnnnnnnnnnnnnnnnnnnnnnnnnnnnnnnnnnnnnnnnnnnnnnnnnnnnnnnnnnnnnnnnnnnnnnnnnnnnnnnnnnnnnnnnnnnnnnnnnnnnnnnnnnnnnnnnnnnnnnnnnnnnnnnnnnnnnnnnnnnnnnnnnnnnnnnnnnnnnnnnnnnnnnnnnnnnnnnnnnnnnnnnnnnnnnnnnnnnnnnnnnnnnnnnnnnnnnnnnnnnnnnnnnnnnnnnnnnnnnnnnnnnnnnnnnnnnnnnnnnnnnnnnnnnnnnnnnnnnnnnnnnnnnnnnnnnnnnnnnnnnnnnnnnnnnnnnnnnnnnnnnnnnnnnnnnnnnnnnnnnnnnnnnnnnnnnnnnnnnnnnnnnnnnnnnnnnnnnnnnnnnnnnnnnnnnnnnnnnnnnnnnnnnnnnnnnnnnnnnnnnnnnnnnnnnnnnnnnnnnnnnnnnnnnnnnnnnnnnnnnnnnnnnnnnnnnnnnnnnnnnnnnnnnnnnnnnnnnnnnnnnnnnnnnnnnnnnnnnnnnnnnnnnnnnnnnnnnnnnnnnnnnnnnnnnnnnnnnnnnnnnnnnnnnnnnnnnnnnnnnnnnnnnnnnnnnnnnnnnnnnnnnnnnnnnnnnnnnnnnnnnnnnnnnnnnnnnnnnnnnnnnnnnnnnnnnnnnnnnnnnnnnnnnnnnnnnnnnnnnnnnnnnnnnnnnnnnnnnnnnnnnnnnnnnnnnnnnnnnnnnnnnnnnnnnnnnnnnnnnnnnnnnnnnnnnnnnnnnnnnnnnnnnnnnnnnnnnnnnnnnnnnnnnnnnnnnnnnnnnnnnnnnnnnnnnnnnnnnnnnnnnnnnnnnnnnnnnnnnnnnnnnnnnnnnnnnnnnnnnnnnnnnnnnnnnnnnnnnnnnnnnnnnnnnnnnnnnnnnnnnnnnnnnnnnnnnnnnnnnnnnnnnnnnnnnnnnnnnnnnnnnnnnnnnnnnnnnnnnnnnnnnnnnnnnnnnnnnnnnnnnnnnnnnnnnnnnnnnnnnnnnnnnnnnnnnnnnnnnnnnnnnnnnnnnnnnnnnnnnnnnnnnnnnnnnnnnnnnnnnnnnnnnnnnnnnnnnnnnnnnnnnnnnnnnnnnnnnnnnnnnnnnnnnnnnnnnnnnnnnnnnnnnnnnnnnnnnnnnnnnnnnnnnnnnnnnnnnnnnnnnnnnnnnnnnnnnnnnnnnnnnnnnnnnnnnnnnnnnnnnnnnnnnnnnnnnnnnnnnnnnnnnnnnnnnnnnnnnnnnnnnnnnnnnnnnnnnnnnnnnnnnnnnnnnnnnnnnnnnnnnnnnnnnnnnnnnnnnnnnnnnnnnnnnnnnnnnnnnnnnnnnnnnnnnnnnnnnnnnnnnnnnnnnnnnnnnnnnnnnnnnnnnnnnnnnnnnnnnnnnnnnnnnnnnnnnnnnnnnnnnnnnnnnnnnnnnnnnnnnnnnnnnnnnnnnnnnnnnnnnnnnnnnnnnnnnnnnnnnnnnnnnnnnnnnnnnnnnnnnnnnnnnnnnnnnnnnnnnnnnnnnnnnnnnnnnnnnnnnnnnnnnnnnnnnnnnnnnnnnnnnnnnnnnnnnnnnnnnnnnnnnnnnnnnnnnnnnnnnnnnnnnnnnnnnnnnnnnnnnnnnnnnnnnnnnnnnnnnnnnnnnnnnnnnnnnnnnnnnnnnnnnnnnnnnnnnnnnnnnnnnnnnnnnnnnnnnnnnnnnnnnnnnnnnnnnnnnnnnnnnnnnnnnnnnnnnnnnnnnnnnnnnnnnnnnnnnnnnnnnnnnnnnnnnnnnnnnnnnnnnnnnnnnnnnnnnnnnnnnnnnnnnnnnnnnnnnnnnnnnnnnnnnnnnnnnnnnnnnnnnnnnnnnnnnnnnnnnnnnnnnnnnnnnnnnnnnnnnnnnnnnnnnnnnnnnnnnnnnnnnnnnnnnnnnnnnnnnnnnnnnnnnnnnnnnnnnnnnnnnnnnnnnnnnnnnnnnnnnnnnnnnnnnnnnnnnnnnnnnnnnnnnnnnnnnnnnnnnnnnnnnnnnnnnnnnnnnnnnnnnnnnnnnnnnnnnnnnnnnnnnnnnnnnnnnnnnnnnnnnnnnnnnnnnnnnnnnnnnnnnnnnnnnnnnnnnnnnnnnnnnnnnnnnnnnnnnnnnnnnnnnnnnnnnnnnnnnnnnnnnnnnnnnnnnnnnnnnnnnnnnnnnnnnnnnnnnnnnnnnnnnnnnnnnnnnnnnnnnnnnnnnnnnnnnnnnnnnnnnnnnnnnnnnnnnnnnnnnnnnnnnnnnnnnnnnnnnnnnnnnnnnnnnnnnnnnnnnnnnnnnnnnnnnnnnnnnnnnnnnnnnnnnnnnnnnnnnnnnnnnnnnnnnnnnnnnnnnnnnnnnnnnnnnnnnnnnnnnnnnnnnnnnnnnnnnnnnnnnnnnnnnnnnnnnnnnnnnnnnnnnnnnnnnnnnnnnnnnnnnnnnnnnnnnnnnnnnnnnnnnnnnnnnnnnnnnnnnnnnnnnnnnnnnnnnnnnnnnnnnnnnnnnnnnnnnnnnnnnnnnnnnnnnnnnnnnnnnnnnnnnnnnnnnnnnnnnnnnnnnnnnnnnnnnnnnnnnnnnnnnnnnnnnnnnnnnnnnnnnnnnnnnnnnnnnnnnnnnnnnnnnnnnnnnnnnnnnnnnnnnnnnnnnnnnnnnnnnnnnnnnnnnnnnnnnnnnnnnnnnnnnnnnnnnnnnnnnnnnnnnnnnnnnnnnnnnnnnnnnnnnnnnnnnnnnnnnnnnnnnnnnnnnnnnnnnnnnnnnnnnnnnnnnnnnnnnnnnnnnnnnnnnnnnnnnnnnnnnnnnnnnnnnnnnnnnnnnnnnnnnnnnnnnnnnnnnnnnnnnnnnnnnnnnnnnnnnnnnnnnnnnnnnnnnnnnnnnnnnnnnnnnnnnnnnnnnnnnnnnnnnnnnnnnnnnnnnnnnnnnnnnnnnnnnnnnnnnnnnnnnnnnnnnnnnnnnnnnnnnnnnnnnnnnnnnnnnnnnnnnnnnnnnnnnnnnnnnnnnnnnnnnnnnnnnnnnnnnnnnnnnnnnnnnnnnnnnnnnnnnnnnnnnnnnnnnnnnnnnnnnnnnnnnnnnnnnnnnnnnnnnnnnnnnnnnnnnnnnnnnnnnnnnnnnnnnnnnnnnnnnnnnnnnnnnnnnnnnnnnnnnnnnnnnnnnnnnnnnnnnnnnnnnnnnnnnnnnnnnnnnnnnnnnnnnnnnnnnnnnnnnnnnnnnnnnnnnnnnnnnnnnnnnnnnnnnnnnnnnnnnnnnnnnnnnnnnnnnnnnnnnnnnnnnnnnnnnnnnnnnnnnnnnnnnnnnnnnnnnnnnnnnnnnnnnnnnnnnnnnnnnnnnnnnnnnnnnnnnnnnnnnnnnnnnnnnnnnnnnnnnnnnnnnnnnnnnnnnnnnnnnnnnnnnnnnnnnnnnnnnnnnnnnnnnnnnnnnnnnnnnnnnnnnnnnnnnnnnnnnnnnnnnnnnnnnnnnnnnnnnnnnnnnnnnnnnnnnnnnnnnnnnnnnnnnnnnnnnnnnnnnnnnnnnnnnnnnnnnnnnnnnnnnnnnnnnnnnnnnnnnnnnnnnnnnnnnnnnnnnnnnnnnnnnnnnnnnnnnnnnnnnnnnnnnnnnnnnnnnnnnnnnnnnnnnnnnnnnnnnnnnnnnnnnnnnnnnnnnnnnnnnnnnnnnnnnnnnnnnnnnnnnnnnnnnnnnnnnnnnnnnnnnnnnnnnnnnnnnnnnnnnnnnnnnnnnnnnnnnnnnnnnnnnnnnnnnnnnnnnnnnnnnnnnnnnnnnnnnnnnnnnnnnnnnnnnnnnnnnnnnnnnnnnnnnnnnnnnnnnnnnnnnnnnnnnnnnnnnnnnnnnnnnnnnnnnnnnnnnnnnnnnnnnnnnnnnnnnnnnnnnnnnnnnnnnnnnnnnnnnnnnnnnnnnnnnnnnnnnnnnnnnnnnnnnnnnnnnnnnnnnnnnnnnnnnnnnnnnnnnnnnnnnnnnnnnnnnnnnnnnnnnnnnnnnnnnnnnnnnnnnnnnnnnnnnnnnnnnnnnnnnnnnnnnnnnnnnnnnnnnnnnnnnnnnnnnnnnnnnnnnnnnnnnnnnnnnnnnnnnnnnnnnnnnnnnnnnnnnnnnnnnnnnnnnnnnnnnnnnnnnnnnnnnnnnnnnnnnnnnnnnnnnnnnnnnnnnnnnnnnnnnnnnnnnnnnnnnnnnnnnnnnnnnnnnnnnnnnnnnnnnnnnnnnnnnnnnnnnnnnnnnnnnnnnnnnnnnnnnnnnnnnnnnnnnnnnnnnnnnnnnnnnnnnnnnnnnnnnnnnnnnnnnnnnnnnnnnnnnnnnnnnnnnnnnnnnnnnnnnnnnnnnnnnnnnnnnnnnnnnnnnnnnnnnnnnnnnnnnnnnnnnnnnnnnnnnnnnnnnnnnnnnnnnnnnnnnnnnnnnnnnnnnnnnnnnnnnnnnnnnnnnnnnnnnnnnnnnnnnnnnnnnnnnnnnnnnnnnnnnnnnnnnnnnnnnnnnnnnnnnnnnnnnnnnnnnnnnnnnnnnnnnnnnnnnnnnnnnnnnnnnnnnnnnnnnnnnnnnnnnnnnnnnnnnnnnnnnnnnnnnnnnnnnnnnnnnnnnnnnnnnnnnnnnnnnnnnnnnnnnnnnnnnnnnnnnnnnnnnnnnnnnnnnnnnnnnnnnnnnnnnnnnnnnnnnnnnnnnnnnnnnnnnnnnnnnnnnnnnnnnnnnnnnnnnnnnnnnnnnnnnnnnnnnnnnnnnnnnnnnnnnnnnnnnnnnnnnnnnnnnnnnnnnnnnnnnnnnnnnnnnnnnnnnnnnnnnnnnnnnnnnnnnnnnnnnnnnnnnnnnnnnnnnnnnnnnnnnnnnnnnnnnnnnnnnnnnnnnnnnnnnnnnnnnnnnnnnnnnnnnnnnnnnnnnnnnnnnnnnnnnnnnnnnnnnnnnnnnnnnnnnnnnnnnnnnnnnnnnnnnnnnnnnnnnnnnnnnnnnnnnnnnnnnnnnnnnnnnnnnnnnnnnnnnnnnnnnnnnnnnnnnnnnnnnnnnnnnnnnnnnnnnnnnnnnnnnnnnnnnnnnnnnnnnnnnnnnnnnnnnnnnnnnnnnnnnnnnnnnnnnnnnnnnnnnnnnnnnnnnnnnnnnnnnnnnnnnnnnnnnnnnnnnnnnnnnnnnnnnnnnnnnnnnnnnnnnnnnnnnnnnnnnnnnnnnnnnnnnnnnnnnnnnnnnnnnnnnnnnnnnnnnnnnnnnnnnnnnnnnnnnnnnnnnnnnnnnnnnnnnnnnnnnnnnnnnnnnnnnnnnnnnnnnnnnnnnnnnnnnnnnnnnnnnnnnnnnnnnnnnnnnnnnnnnnnnnnnnnnnnnnnnnnnnnnnnnnnnnnnnnnnnnnnnnnnnnnnnnnnnnnnnnnnnnnnnnnnnnnnnnnnnnnnnnnnnnnnnnnnnnnnnnnnnnnnnnnnnnnnnnnnnnnnnnnnnnnnnnnnnnnnnnnnnnnnnnnnnnnnnnnnnnnnnnnnnnnnnnnnnnnnnnnnnnnnnnnnnnnnnnnnnnnnnnnnnnnnnnnnnnnnnnnnnnnnnnnnnnnnnnnnnnnnnnnnnnnnnnnnnnnnnnnnnnnnnnnnnnnnnnnnnnnnnnnnnnnnnnnnnnnnnnnnnnnnnnnnnnnnnnnnnnnnnnnnnnnnnnnnnnnnnnnnnnnnnnnnnnnnnnnnnnnnnnnnnnnnnnnnnnnnnnnnnnnnnnnnnnnnnnnnnnnnnnnnnnnnnnnnnnnnnnnnnnnnnnnnnnnnnnnnnnnnnnnnnnnnnnnnnnnnnnnnnnnnnnnnnnnnnnnnnnnnnnnnnnnnnnnnnnnnnnnnnnnnnnnnnnnnnnnnnnnnnnnnnnnnnnnnnnnnnnnnnnnnnnnnnnnnnnnnnnnnnnnnnnnnnnnnnnnnnnnnnnnnnnnnnnnnnnnnnnnnnnnnnnnnnnnnnnnnnnnnnnnnnnnnnnnnnnnnnnnnnnnnnnnnnnnnnnnnnnnnnnnnnnnnnnnnnnnnnnnnnnnnnnnnnnnnnnnnnnnnnnnnnnnnnnnnnnnnnnnnnnnnnnnnnnnnnnnnnnnnnnnnnnnnnnnnnnnnnnnnnnnnnnnnnnnnnnnnnnnnnnnnnnnnnnnnnnnnnnnnnnnnnnnnnnnnnnnnnnnnnnnnnnnnnnnnnnnnnnnnnnnnnnnnnnnnnnnnnnnnnnnnnnnnnnnnnnnnnnnnnnnnnnnnnnnnnnnnnnnnnnnnnnnnnnnnnnnnnnnnnnnnnnnnnnnnnnnnnnnnnnnnnnnnnnnnnnnnnnnnnnnnnnnnnnnnnnnnnnnnnnnnnnnnnnnnnnnnnnnnnnnnnnnnnnnnnnnnnnnnnnnnnnnnnnnnnnnnnnnnnnnnnnnnnnnnnnnnnnnnnnnnnnnnnnnnnnnnnnnnnnnnnnnnnnnnnnnnnnnnnnnnnnnnnnnnnnnnnnnnnnnnnnnnnnnnnnnnnnnnnnnnnnnnnnnnnnnnnnnnnnnnnnnnnnnnnnnnnnnnnnnnnnnnnnnnnnnnnnnnnnnnnnnnnnnnnnnnnnnnnnnnnnnnnnnnnnnnnnnnnnnnnnnnnnnnnnnnnnnnnnnnnnnnnnnnnnnnnnnnnnnnnnnnnnnnnnnnnnnnnnnnnnnnnnnnnnnnnnnnnnnnnnnnnnnnnnnnnnnnnnnnnnnnnnnnnnnnnnnnnnnnnnnnnnnnnnnnnnnnnnnnnnnnnnnnnnnnnnnnnnnnnnnnnnnnnnnnnnnnnnnnnnnnnnnnnnnnnnnnnnnnnnnnnnnnnnnnnnnnnnnnnnnnnnnnnnnnnnnnnnnnnnnnnnnnnnnnnnnnnnnnnnnnnnnnnnnnnnnnnnnnnnnnnnnnnnnnnnnnnnnnnnnnnnnnnnnnnnnnnnnnnnnnnnnnnnnnnnnnnnnnnnnnnnnnnnnnnnnnnnnnnnnnnnnnnnnnnnnnnnnnnnnnnnnnnnnnnnnnnnnnnnnnnnnnnnnnnnnnnnnnnnnnnnnnnnnnnnnnnnnnnnnnnnnnnnnnnnnnnnnnnnnnnnnnnnnnnnnnnnnnnnnnnnnnnnnnnnnnnnnnnnnnnnnnnnnnnnnnnnnnnnnnnnnnnnnnnnnnnnnnnnnnnnnnnnnnnnnnnnnnnnnnnnnnnnnnnnnnnnnnnnnnnnnnnnnnnnnnnnnnnnnnnnnnnnnnnnnnnnnnnnnnnnnnnnnnnnnnnnnnnnnnnnnnnnnnnnnnnnnnnnnnnnnnnnnnnnnnnnnnnnnnnnnnnnnnnnnnnnnnnnnnnnnnnnnnnnnnnnnnnnnnnnnnnnnnnnnnnnnnnnnnnnnnnnnnnnnnnnnnnnnnnnnnnnnnnnnnnnnnnnnnnnnnnnnnnnnnnnnnnnnnnnnnnnnnnnnnnnnnnnnnnnnnnnnnnnnnnnnnnnnnnnnnnnnnnnnnnnnnnnnnnnnnnnnnnnnnnnnnnnnnnnnnnnnnnnnnnnnnnnnnnnnnnnnnnnnnnnnnnnnnnnnnnnnnnnnnnnnnnnnnnnnnnnnnnnnnnnnnnnnnnnnnnnnnnnnnnnnnnnnnnnnnnnnnnnnnnnnnnnnnnnnnnnnnnnnnnnnnnnnnnnnnnnnnnnnnnnnnnnnnnnnnnnnnnnnnnnnnnnnnnnnnnnnnnnnnnnnnnnnnnnnnnnnnnnnnnnnnnnnnnnnnnnnnnnnnnnnnnnnnnnnnnnnnnnnnnnnnnnnnnnnnnnnnnnnnnnnnnnnnnnnnnnnnnnnnnnnnnnnnnnnnnnnnnnnnnnnnnnnnnnnnnnnnnnnnnnnnnnnnnnnnnnnnnnnnnnnnnnnnnnnnnnnnnnnnnnnnnnnnnnnnnnnnnnnnnnnnnnnnnnnnnnnnnnnnnnnnnnnnnnnnnnnnnnnnnnnnnnnnnnnnnnnnnnnnnnnnnnnnnnnnnnnnnnnnnnnnnnnnnnnnnnnnnnnnnnnnnnnnnnnnnnnnnnnnnnnnnnnnnnnnnnnnnnnnnnnnnnnnnnnnnnnnnnnnnnnnnnnnnnnnnnnnnnnnnnnnnnnnnnnnnnnnnnnnnnnnnnnnnnnnnnnnnnnnnnnnnnnnnnnnnnnnnnnnnnnnnnnnnnnnnnnnnnnnnnnnnnnnnnnnnnnnnnnnnnnnnnnnnnnnnnnnnnnnnnnnnnnnnnnnnnnnnnnnnnnnnnnnnnnnnnnnnnnnnnnnnnnnnnnnnnnnnnnnnnnnnnnnnnnnnnnnnnnnnnnnnnnnnnnnnnnnnnnnnnnnnnnnnnnnnnnnnnnnnnnnnnnnnnnnnnnnnnnnnnnnnnnnnnnnnnnnnnnnnnnnnnnnnnnnnnnnnnnnnnnnnnnnnnnnnnnnnnnnnnnnnnnnnnnnnnnnnnnnnnnnnnnnnnnnnnnnnnnnnnnnnnnnnnnnnnnnnnnnnnnnnnnnnnnnnnnnnnnnnnnnnnnnnnnnnnnnnnnnnnnnnnnnnnnnnnnnnnnnnnnnnnnnnnnnnnnnnnnnnnnnnnnnnnnnnnnnnnnnnnnnnnnnnnnnnnnnnnnnnnnnnnnnnnnnnnnnnnnnnnnnnnnnnnnnnnnnnnnnnnnnnnnnnnnnnnnnnnnnnnnnnnnnnnnnnnnnnnnnnnnnnnnnnnnnnnnnnnnnnnnnnnnnnnnnnnnnnnnnnnnnnnnnnnnnnnnnnnnnnnnnnnnnnnnnnnnnnnnnnnnnnnnnnnnnnnnnnnnnnnnnnnnnnnnnnnnnnnnnnnnnnnnnnnnnnnnnnnnnnnnnnnnnnnnnnnnnnnnnnnnnnnnnnnnnnnnnnnnnnnnnnnnnnnnnnnnnnnnnnnnnnnnnnnnnnnnnnnnnnnnnnnnnnnnnnnnnnnnnnnnnnnnnnnnnnnnnnnnnnnnnnnnnnnnnnnnnnnnnnnnnnnnnnnnnnnnnnnnnnnnnnnnnnnnnnnnnnnnnnnnnnnnnnnnnnnnnnnnnnnnnnnnnnnnnnnnnnnnnnnnnnnnnnnnnnnnnnnnnnnnnnnnnnnnnnnnnnnnnnnnnnnnnnnnnnnnnnnnnnnnnnnnnnnnnnnnnnnnnnnnnnnnnnnnnnnnnnnnnnnnnnnnnnnnnnnnnnnnnnnnnnnnnnnnnnnnnnnnnnnnnnnnnnnnnnnnnnnnnnnnnnnnnnnnnnnnnnnnnnnnnnnnnnnnnnnnnnnnnnnnnnnnnnnnnnnnnnnnnnnnnnnnnnnnnnnnnnnnnnnnnnnnnnnnnnnnnnnnnnnnnnnnnnnnnnnnnnnnnnnnnnnnnnnnnnnnnnnnnnnnnnnnnnnnnnnnnnnnnnnnnnnnnnnnnnnnnnnnnnnnnnnnnnnnnnnnnnnnnnnnnnnnnnnnnnnnnnnnnnnnnnnnnnnnnnnnnnnnnnnnnnnnnnnnnnnnnnnnnnnnnnnnnnnnnnnnnnnnnnnnnnnnnnnnnnnnnnnnnnnnnnnnnnnnnnnnnnnnnnnnnnnnnnnnnnnnnnnnnnnnnnnnnnnnnnnnnnnnnnnnnnnnnnnnnnnnnnnnnnnnnnnnnnnnnnnnnnnnnnnnnnnnnnnnnnnnnnnnnnnnnnnnnnnnnnnnnnnnnnnnnnnnnnnnnnnnnnnnnnnnnnnnnnnnnnnnnnnnnnnnnnnnnnnnnnnnnnnnnnnnnnnnnnnnnnnnnnnnnnnnnnnnnnnnnnnnnnnnnnnnnnnnnnnnnnnnnnnnnnnnnnnnnnnnnnnnnnnnnnnnnnnnnnnnnnnnnnnnnnnnnnnnnnnnnnnnnnnnnnnnnnnnnnnnnnnnnnnnnnnnnnnnnnnnnnnnnnnnnnnnnnnnnnnnnnnnnnnnnnnnnnnnnnnnnnnnnnnnnnnnnnnnnnnnnnnnnnnnnnnnnnnnnnnnnnnnnnnnnnnnnnnnnnnnnnnnnnnnnnnnnnnnnnnnnnnnnnnnnnnnnnnnnnnnnnnnnnnnnnnnnnnnnnnnnnnnnnnnnnnnnnnnnnnnnnnnnnnnnnnnnnnnnnnnnnnnnnnnnnnnnnnnnnnnnnnnnnnnnnnnnnnnnnnnnnnnnnnnnnnnnnnnnnnnnnnnnnnnnnnnnnnnnnnnnnnnnnnnnnnnnnnnnnnnnnnnnnnnnnnnnnnnnnnnnnnnnnnnnnnnnnnnnnnnnnnnnnnnnnnnnnnnnnnnnnnnnnnnnnnnnnnnnnnnnnnnnnnnnnnnnnnnnnnnnnnnnnnnnnnnnnnnnnnnnnnnnnnnnnnnnnnnnnnnnnnnnnnnnnnnnnnnnnnnnnnnnnnnnnnnnnnnnnnnnnnnnnnnnnnnnnnnnnnnnnnnnnnnnnnnnnnnnnnnnnnnnnnnnnnnnnnnnnnnnnnnnnnnnnnnnnnnnnnnnnnnnnnnnnnnnnnnnnnnnnnnnnnnnnnnnnnnnnnnnnnnnnnnnnnnnnnnnnnnnnnnnnnnnnnnnnnnnnnnnnnnnnnnnnnnnnnnnnnnnnnnnnnnnnnnnnnnnnnnnnnnnnnnnnnnnnnnnnnnnnnnnnnnnnnnnnnnnnnnnnnnnnnnnnnnnnnnnnnnnnnnnnnnnnnnnnnnnnnnnnnnnnnnnnnnnnnnnnnnnnnnnnnnnnnnnnnnnnnnnnnnnnnnnnnnnnnnnnnnnnnnnnnnnnnnnnnnnnnnnnnnnnnnnnnnnnnnnnnnnnnnnnnnnnnnnnnnnnnnnnnnnnnnnnnnnnnnnnnnnnnnnnnnnnnnnnnnnnnnnnnnnnnnnnnnnnnnnnnnnnnnnnnnnnnnnnnnnnnnnnnnnnnnnnnnnnnnnnnnnnnnnnnnnnnnnnnnnnnnnnnnnnnnnnnnnnnnnnnnnnnnnnnnnnnnnnnnnnnnnnnnnnnnnnnnnnnnnnnnnnnnnnnnnnnnnnnnnnnnnnnnnnnnnnnnnnnnnnnnnnnnnnnnnnnnnnnnnnnnnnnnnnnnnnnnnnnnnnnnnnnnnnnnnnnnnnnnnnnnnnnnnnnnnnnnnnnnnnnnnnnnnnnnnnnnnnnnnnnnnnnnnnnnnnnnnnnnnnnnnnnnnnnnnnnnnnnnnnnnnnnnnnnnnnnnnnnnnnnnnnnnnnnnnnnnnnnnnnnnnnnnnnnnnnnnnnnnnnnnnnnnnnnnnnnnnnnnnnnnnnnnnnnnnnnnnnnnnnnnnnnnnnnnnnnnnnnnnnnnnnnnnnnnnnnnnnnnnnnnnnnnnnnnnnnnnnnnnnnnnnnnnnnnnnnnnnnnnnnnnnnnnnnnnnnnnnnnnnnnnnnnnnnnnnnnnnnnnnnnnnnnnnnnnnnnnnnnnnnnnnnnnnnnnnnnnnnnnnnnnnnnnnnnnnnnnnnnnnnnnnnnnnnnnnnnnnnnnnnnnnnnnnnnnnnnnnnnnnnnnnnnnnnnnnnnnnnnnnnnnnnnnnnnnnnnnnnnnnnnnnnnnnnnnnnnnnnnnnnnnnnnnnnnnnnnnnnnnnnnnnnnnnnnnnnnnnnnnnnnnnnnnnnnnnnnnnnnnnnnnnnnnnnnnnnnnnnnnnnnnnnnnnnnnnnnnnnnnnnnnnnnnnnnnnnnnnnnnnnnnnnnnnnnnnnnnnnnnnnnnnnnnnnnnnnnnnnnnnnnnnnnnnnnnnnnnnnnnnnnnnnnnnnnnnnnnnnnnnnnnnnnnnnnnnnnnnnnnnnnnnnnnnnnnnnnnnnnnnnnnnnnnnnnnnnnnnnnnnnnnnnnnnnnnnnnnnnnnnnnnnnnnnnnnnnnnnnnnnnnnnnnnnnnnnnnnnnnnnnnnnnnnnnnnnnnnnnnnnnnnnnnnnnnnnnnnnnnnnnnnnnnnnnnnnnnnnnnnnnnnnnnnnnnnnnnnnnnnnnnnnnnnnnnnnnnnnnnnnnnnnnnnnnnnnnnnnnnnnnnnnnnnnnnnnnnnnnnnnnnnnnnnnnnnnnnnnnnnnnnnnnnnnnnnnnnnnnnnnnnnnnnnnnnnnnnnnnnnnnnnnnnnnnnnnnnnnnnnnnnnnnnnnnnnnnnnnnnnnnnnnnnnnnnnnnnnnnnnnnnnnnnnnnnnnnnnnnnnnnnnnnnnnnnnnnnnnnnnnnnnnnnnnnnnnnnnnnnnnnnnnnnnnnnnnnnnnnnnnnnnnnnnnnnnnnnnnnnnnnnnnnnnnnnnnnnnnnnnnnnnnnnnnnnnnnnnnnnnnnnnnnnnnnnnnnnnnnnnnnnnnnnnnnnnnnnnnnnnnnnnnnnnnnnnnnnnnnnnnnnnnnnnnnnnnnnnnnnnnnnnnnnnnnnnnnnnnnnnnnnnnnnnnnnnnnnnnnnnnnnnnnnnnnnnnnnnnnnnnnnnnnnnnnnnnnnnnnnnnnnnnnnnnnnnnnnnnnnnnnnnnnnnnnnnnnnnnnnnnnnnnnnnnnnnnnnnnnnnnnnnnnnnnnnnnnnnnnnnnnnnnnnnnnnnnnnnnnnnnnnnnnnnnnnnnnnnnnnnnnnnnnnnnnnnnnnnnnnnnnnnnnnnnnnnnnnnnnnnnnnnnnnnnnnnnnnnnnnnnnnnnnnnnnnnnnnnnnnnnnnnnnnnnnnnnnnnnnnnnnnnnnnnnnnnnnnnnnnnnnnnnnnnnnnnnnnnnnnnnnnnnnnnnnnnnnnnnnnnnnnnnnnnnnnnnnnnnnnnnnnnnnnnnnnnnnnnnnnnnnnnnnnnnnnnnnnnnnnnnnnnnnnnnnnnnnnnnnnnnnnnnnnnnnnnnnnnnnnnnnnnnnnnnnnnnnnnnnnnnnnnnnnnnnnnnnnnnnnnnnnnnnnnnnnnnnnnnnnnnnnnnnnnnnnnnnnnnnnnnnnnnnnnnnnnnnnnnnnnnnnnnnnnnnnnnnnnnnnnnnnnnnnnnnnnnnnnnnnnnnnnnnnnnnnnnnnnnnnnnnnnnnnnnnnnnnnnnnnnnnnnnnnnnnnnnnnnnnnnnnnnnnnnnnnnnnnnnnnnnnnnnnnnnnnnnnnnnnnnnnnnnnnnnnnnnnnnnnnnnnnnnnnnnnnnnnnnnnnnnnnnnnnnnnnnnnnnnnnnnnnnnnnnnnnnnnnnnnnnnnnnnnnnnnnnnnnnnnnnnnnnnnnnnnnnnnnnnnnnnnnnnnnnnnnnnnnnnnnnnnnnnnnnnnnnnnnnnnnnnnnnnnnnnnnnnnnnnnnnnnnnnnnnnnnnnnnnnnnnnnnnnnnnnnnnnnnnnnnnnnnnnnnnnnnnnnnnnnnnnnnnnnnnnnnnnnnnnnnnnnnnnnnnnnnnnnnnnnnnnnnnnnnnnnnnnnnnnnnnnnnnnnnnnnnnnnnnnnnnnnnnnnnnnnnnnnnnnnnnnnnnnnnnnnnnnnnnnnnnnnnnnnnnnnnnnnnnnnnnnnnnnnnnnnnnnnnnnnnnnnnnnnnnnnnnnnnnnnnnnnnnnnnnnnnnnnnnnnnnnnnnnnnnnnnnnnnnnnnnnnnnnnnnnnnnnnnnnnnnnnnnnnnnnnnnnnnnnnnnnnnnnnnnnnnnnnnnnnnnnnnnnnnnnnnnnnnnnnnnnnnnnnnnnnnnnnnnnnnnnnnnnnnnnnnnnnnnnnnnnnnnnnnnnnnnnnnnnnnnnnnnnnnnnnnnnnnnnnnnnnnnnnnnnnnnnnnnnnnnnnnnnnnnnnnnnnnnnnnnnnnnnnnnnnnnnnnnnnnnnnnnnnnnnnnnnnnnnnnnnnnnnnnnnnnnnnnnnnnnnnnnnnnnnnnnnnnnnnnnnnnnnnnnnnnnnnnnnnnnnnnnnnnnnnnnnnnnnnnnnnnnnnnnnnnnnnnnnnnnnnnnnnnnnnnnnnnnnnnnnnnnnnnnnnnnnnnnnnnnnnnnnnnnnnnnnnnnnnnnnnnnnnnnnnnnnnnnnnnnnnnnnnnnnnnnnnnnnnnnnnnnnnnnnnnnnnnnnnnnnnnnnnnnnnnnnnnnnnnnnnnnnnnnnnnnnnnnnnnnnnnnnnnnnnnnnnnnnnnnnnnnnnnnnnnnnnnnnnnnnnnnnnnnnnnnnnnnnnnnnnnnnnnnnnnnnnnnnnnnnnnnnnnnnnnnnnnnnnnnnnnnnnnnnnnnnnnnnnnnnnnnnnnnnnnnnnnnnnnnnnnnnnnnnnnnnnnnnnnnnnnnnnnnnnnnnnnnnnnnnnnnnnnnnnnnnnnnnnnnnnnnnnnnnnnnnnnnnnnnnnnnnnnnnnnnnnnnnnnnnnnnnnnnnnnnnnnnnnnnnnnnnnnnnnnnnnnnnnnnnnnnnnnnnnnnnnnnnnnnnnnnnnnnnnnnnnnnnnnnnnnnnnnnnnnnnnnnnnnnnnnnnnnnnnnnnnnnnnnnnnnnnnnnnnnnnnnnnnnnnnnnnnnnnnnnnnnnnnnnnnnnnnnnnnnnnnnnnnnnnnnnnnnnnnnnnnnnnnnnnnnnnnnnnnnnnnnnnnnnnnnnnnnnnnnnnnnnnnnnnnnnnnnnnnnnnnnnnnnnnnnnnnnnnnnnnnnnnnnnnnnnnnnnnnnnnnnnnnnnnnnnnnnnnnnnnnnnnnnnnnnnnnnnnnnnnnnnnnnnnnnnnnnnnnnnnnnnnnnnnnnnnnnnnnnnnnnnnnnnnnnnnnnnnnnnnnnnnnnnnnnnnnnnnnnnnnnnnnnnnnnnnnnnnnnnnnnnnnnnnnnnnnnnnnnnnnnnnnnnnnnnnnnnnnnnnnnnnnnnnnnnnnnnnnnnnnnnnnnnnnnnnnnnnnnnnnnnnnnnnnnnnnnnnnnnnnnnnnnnnnnnnnnnnnnnnnnnnnnnnnnnnnnnnnnnnnnnnnnnnnnnnnnnnnnnnnnnnnnnnnnnnnnnnnnnnnnnnnnnnnnnnnnnnnnnnnnnnnnnnnnnnnnnnnnnnnnnnnnnnnnnnnnnnnnnnnnnnnnnnnnnnnnnnnnnnnnnnnnnnnnnnnnnnnnnnnnnnnnnnnnnnnnnnnnnnnnnnnnnnnnnnnnnnnnnnnnnnnnnnnnnnnnnnnnnnnnnnnnnnnnnnnnnnnnnnnnnnnnnnnnnnnnnnnnnnnnnnnnnnnnnnnnnnnnnnnnnnnnnnnnnnnnnnnnnnnnnnnnnnnnnnnnnnnnnnnnnnnnnnnnnnnnnnnnnnnnnnnnnnnnnnnnnnnnnnnnnnnnnnnnnnnnnnnnnnnnnnnnnnnnnnnnnnnnnnnnnnnnnnnnnnnnnnnnnnnnnnnnnnnnnnnnnnnnnnnnnnnnnnnnnnnnnnnnnnnnnnnnnnnnnnnnnnnnnnnnnnnnnnnnnnnnnnnnnnnnnnnnnnnnnnnnnnnnnnnnnnnnnnnnnnnnnnnnnnnnnnnnnnnnnnnnnnnnnnnnnnnnnnnnnnnnnnnnnnnnnnnnnnnnnnnnnnnnnnnnnnnnnnnnnnnnnnnnnnnnnnnnnnnnnnnnnnnnnnnnnnnnnnnnnnnnnnnnnnnnnnnnnnnnnnnnnnnnnnnnnnnnnnnnnnnnnnnnnnnnnnnnnnnnnnnnnnnnnnnnnnnnnnnnnnnnnnnnnnnnnnnnnnnnnnnnnnnnnnnnnnnnnnnnnnnnnnnnnnnnnnnnnnnnnnnnnnnnnnnnnnnnnnnnnnnnnnnnnnnnnnnnnnnnnnnnnnnnnnnnnnnnnnnnnnnnnnnnnnnnnnnnnnnnnnnnnnnnnnnnnnnnnnnnnnnnnnnnnnnnnnnnnnnnnnnnnnnnnnnnnnnnnnnnnnnnnnnnnnnnnnnnnnnnnnnnnnnnnnnnnnnnnnnnnnnnnnnnnnnnnnnnnnnnnnnnnnnnnnnnnnnnnnnnnnnnnnnnnnnnnnnnnnnnnnnnnnnnnnnnnnnnnnnnnnnnnnnnnnnnnnnnnnnnnnnnnnnnnnnnnnnnnnnnnnnnnnnnnnnnnnnnnnnnnnnnnnnnnnnnnnnnnnnnnnnnnnnnnnnnnnnnnnnnnnnnnnnnnnnnnnnnnnnnnnnnnnnnnnnnnnnnnnnnnnnnnnnnnnnnnnnnnnnnnnnnnnnnnnnnnnnnnnnnnnnnnnnnnnnnnnnnnnnnnnnnnnnnnnnnnnnnnnnnnnnnnnnnnnnnnnnnnnnnnnnnnnnnnnnnnnnnnnnnnnnnnnnnnnnnnnnnnnnnnnnnnnnnnnnnnnnnnnnnnnnnnnnnnnnnnnnnnnnnnnnnnnnnnnnnnnnnnnnnnnnnnnnnnnnnnnnnnnnnnnnnnnnnnnnnnnnnnnnnnnnnnnnnnnnnnnnnnnnnnnnnnnnnnnnnnnnnnnnnnnnnnnnnnnnnnnnnnnnnnnnnnnnnnnnnnnnnnnnnnnnnnnnnnnnnnnnnnnnnnnnnnnnnnnnnnnnnnnnnnnnnnnnnnnnnnnnnnnnnnnnnnnnnnnnnnnnnnnnnnnnnnnnnnnnnnnnnnnnnnnnnnnnnnnnnnnnnnnnnnnnnnnnnnnnnnnnnnnnnnnnnnnnnnnnnnnnnnnnnnnnnnnnnnnnnnnnnnnnnnnnnnnnnnnnnnnnnnnnnnnnnnnnnnnnnnnnnnnnnnnnnnnnnnnnnnnnnnnnnnnnnnnnnnnnnnnnnnnnnnnnnnnnnnnnnnnnnnnnnnnnnnnnnnnnnnnnnnnnnnnnnnnnnnnnnnnnnnnnnnnnnnnnnnnnnnnnnnnnnnnnnnnnnnnnnnnnnnnnnnnnnnnnnnnnnnnnnnnnnnnnnnnnnnnnnnnnnnnnnnnnnnnnnnnnnnnnnnnnnnnnnnnnnnnnnnnnnnnnnnnnnnnnnnnnnnnnnnnnnnnnnnnnnnnnnnnnnnnnnnnnnnnnnnnnnnnnnnnnnnnnnnnnnnnnnnnnnnnnnnnnnnnnnnnnnnnnnnnnnnnnnnnnnnnnnnnnnnnnnnnnnnnnnnnnnnnnnnnnnnnnnnnnnnnnnnnnnnnnnnnnnnnnnnnnnnnnnnnnnnnnnnnnnnnnnnnnnnnnnnnnnnnnnnnnnnnnnnnnnnnnnnnnnnnnnnnnnnnnnnnnnnnnnnnnnnnnnnnnnnnnnnnnnnnnnnnnnnnnnnnnnnnnnnnnnnnnnnnnnnnnnnnnnnnnnnnnnnnnnnnnnnnnnnnnnnnnnnnnnnnnnnnnnnnnnnnnnnnnnnnnnnnnnnnnnnnnnnnnnnnnnnnnnnnnnnnnnnnnnnnnnnnnnnnnnnnnnnnnnnnnnnnnnnnnnnnnnnnnnnnnnnnnnnnnnnnnnnnnnnnnnnnnnnnnnnnnnnnnnnnnnnnnnnnnnnnnnnnnnnnnnnnnnnnnnnnnnnnnnnnnnnnnnnnnnnnnnnnnnnnnnnnnnnnnnnnnnnnnnnnnnnnnnnnnnnnnnnnnnnnnnnnnnnnnnnnnnnnnnnnnnnnnnnnnnnnnnnnnnnnnnnnnnnnnnnnnnnnnnnnnnnnnnnnnnnnnnnnnnnnnnnnnnnnnnnnnnnnnnnnnnnnnnnnnnnnnnnnnnnnnnnnnnnnnnnnnnnnnnnnnnnnnnnnnnnnnnnnnnnnnnnnnnnnnnnnnnnnnnnnnnnnnnnnnnnnnnnnnnnnnnnnnnnnnnnnnnnnnnnnnnnnnnnnnnnnnnnnnnnnnnnnnnnnnnnnnnnnnnnnnnnnnnnnnnnnnnnnnnnnnnnnnnnnnnnnnnnnnnnnnnnnnnnnnnnnnnnnnnnnnnnnnnnnnnnnnnnnnnnnnnnnnnnnnnnnnnnnnnnnnnnnnnnnnnnnnnnnnnnnnnnnnnnnnnnnnnnnnnnnnnnnnnnnnnnnnnnnnnnnnnnnnnnnnnnnnnnnnnnnnnnnnnnnnnnnnnnnnnnnnnnnnnnnnnnnnnnnnnnnnnnnnnnnnnnnnnnnnnnnnnnnnnnnnnnnnnnnnnnnnnnnnnnnnnnnnnnnnnnnnnnnnnnnnnnnnnnnnnnnnnnnnnnnnnnnnnnnnnnnnnnnnnnnnnnnnnnnnnnnnnnnnnnnnnnnnnnnnnnnnnnnnnnnnnnnnnnnnnnnnnnnnnnnnnnnnnnnnnnnnnnnnnnnnnnnnnnnnnnnnnnnnnnnnnnnnnnnnnnnnnnnnnnnnnnnnnnnnnnnnnnnnnnnnnnnnnnnnnnnnnnnnnnnnnnnnnnnnnnnnnnnnnnnnnnnnnnnnnnnnnnnnnnnnnnnnnnnnnnnnnnnnnnnnnnnnnnnnnnnnnnnnnnnnnnnnnnnnnnnnnnnnnnnnnnnnnnnnnnnnnnnnnnnnnnnnnnnnnnnnnnnnnnnnnnnnnnnnnnnnnnnnnnnnnnnnnnnnnnnnnnnnnnnnnnnnnnnnnnnnnnnnnnnnnnnnnnnnnnnnnnnnnnnnnnnnnnnnnnnnnnnnnnnnnnnnnnnnnnnnnnnnnnnnnnnnnnnnnnnnnnnnnnnnnnnnnnnnnnnnnnnnnnnnnnnnnnnnnnnnnnnnnnnnnnnnnnnnnnnnnnnnnnnnnnnnnnnnnnnnnnnnnnnnnnnnnnnnnnnnnnnnnnnnnnnnnnnnnnnnnnnnnnnnnnnnnnnnnnnnnnnnnnnnnnnnnnnnnnnnnnnnnnnnnnnnnnnnnnnnnnnnnnnnnnnnnnnnnnnnnnnnnnnnnnnnnnnnnnnnnnnnnnnnnnnnnnnnnnnnnnnnnnnnnnnnnnnnnnnnnnnnnnnnnnnnnnnnnnnnnnnnnnnnnnnnnnnnnnnnnnnnnnnnnnnnnnnnnnnnnnnnnnnnnnnnnnnnnnnnnnnnnnnnnnnnnnnnnnnnnnnnnnnnnnnnnnnnnnnnnnnnnnnnnnnnnnnnnnnnnnnnnnnnnnnnnnnnnnnnnnnnnnnnnnnnnnnnnnnnnnnnnnnnnnnnnnnnnnnnnnnnnnnnnnnnnnnnnnnnnnnnnnnnnnnnnnnnnnnnnnnnnnnnnnnnnnnnnnnnnnnnnnnnnnnnnnnnnnnnnnnnnnnnnnnnnnnnnnnnnnnnnnnnnnnnnnnnnnnnnnnnnnnnnnnnnnnnnnnnnnnnnnnnnnnnnnnnnnnnnnnnnnnnnnnnnnnnnnnnnnnnnnnnnnnnnnnnnnnnnnnnnnnnnnnnnnnnnnnnnnnnnnnnnnnnnnnnnnnnnnnnnnnnnnnnnnnnnnnnnnnnnnnnnnnnnnnnnnnnnnnnnnnnnnnnnnnnnnnnnnnnnnnnnnnnnnnnnnnnnnnnnnnnnnnnnnnnnnnnnnnnnnnnnnnnnnnnnnnnnnnnnnnnnnnnnnnnnnnnnnnnnnnnnnnnnnnnnnnnnnnnnnnnnnnnnnnnnnnnnnnnnnnnnnnnnnnnnnnnnnnnnnnnnnnnnnnnnnnnnnnnnnnnnnnnnnnnnnnnnnnnnnnnnnnnnnnnnnnnnnnnnnnnnnnnnnnnnnnnnnnnnnnnnnnnnnnnnnnnnnnnnnnnnnnnnnnnnnnnnnnnnnnnnnnnnnnnnnnnnnnnnnnnnnnnnnnnnnnnnnnnnnnnnnnnnnnnnnnnnnnnnnnnnnnnnnnnnnnnnnnnnnnnnnnnnnnnnnnnnnnnnnnnnnnnnnnnnnnnnnnnnnnnnnnnnnnnnnnnnnnnnnnnnnnnnnnnnnnnnnnnnnnnnnnnnnnnnnnnnnnnnnnnnnnnnnnnnnnnnnnnnnnnnnnnnnnnnnnnnnnnnnnnnnnnnnnnnnnnnnnnnnnnnnnnnnnnnnnnnnnnnnnnnnnnnnnnnnnnnnnnnnnnnnnnnnnnnnnnnnnnnnnnnnnnnnnnnnnnnnnnnnnnnnnnnnnnnnnnnnnnnnnnnnnnnnnnnnnnnnnnnnnnnnnnnnnnnnnnnnnnnnnnnnnnnnnnnnnnnnnnnnnnnnnnnnnnnnnnnnnnnnnnnnnnnnnnnnnnnnnnnnnnnnnnnnnnnnnnnnnnnnnnnnnnnnnnnnnnnnnnnnnnnnnnnnnnnnnnnnnnnnnnnnnnnnnnnnnnnnnnnnnnnnnnnnnnnnnnnnnnnnnnnnnnnnnnnnnnnnnnnnnnnnnnnnnnnnnnnnnnnnnnnnnnnnnnnnnnnnnnnnnnnnnnnnnnnnnnnnnnnnnnnnnnnnnnnnnnnnnnnnnnnnnnnnnnnnnnnnnnnnnnnnnnnnnnnnnnnnnnnnnnnnnnnnnnnnnnnnnnnnnnnnnnnnnnnnnnnnnnnnnnnnnnnnnnnnnnnnnnnnnnnnnnnnnnnnnnnnnnnnnnnnnnnnnnnnnnnnnnnnnnnnnnnnnnnnnnnnnnnnnnnnnnnnnnnnnnnnnnnnnnnnnnnnnnnnnnnnnnnnnnnnnnnnnnnnnnnnnnnnnnnnnnnnnnnnnnnnnnnnnnnnnnnnnnnnnnnnnnnnnnnnnnnnnnnnnnnnnnnnnnnnnnnnnnnnnnnnnnnnnnnnnnnnnnnnnnnnnnnnnnnnnnnnnnnnnnnnnnnnnnnnnnnnnnnnnnnnnnnnnnnnnnnnnnnnnnnnnnnnnnnnnnnnnnnnnnnnnnnnnnnnnnnnnnnnnnnnnnnnnnnnnnnnnnnnnnnnnnnnnnnnnnnnnnnnnnnnnnnnnnnnnnnnnnnnnnnnnnnnnnnnnnnnnnnnnnnnnnnnnnnnnnnnnnnnnnnnnnnnnnnnnnnnnnnnnnnnnnnnnnnnnnnnnnnnnnnnnnnnnnnnnnnnnnnnnnnnnnnnnnnnnnnnnnnnnnnnnnnnnnnnnnnnnnnnnnnnnnnnnnnnnnnnnnnnnnnnnnnnnnnnnnnnnnnnnnnnnnnnnnnnnnnnnnnnnnnnnnnnnnnnnnnnnnnnnnnnnnnnnnnnnnnnnnnnnnnnnnnnnnnnnnnnnnnnnnnnnnnnnnnnnnnnnnnnnnnnnnnnnnnnnnnnnnnnnnnnnnnnnnnnnnnnnnnnnnnnnnnnnnnnnnnnnnnnnnnnnnnnnnnnnnnnnnnnnnnnnnnnnnnnnnnnnnnnnnnnnnnnnnnnnnnnnnnnnnnnnnnnnnnnnnnnnnnnnnnnnnnnnnnnnnnnnnnnnnnnnnnnnnnnnnnnnnnnnnnnnnnnnnnnnnnnnnnnnnnnnnnnnnnnnnnnnnnnnnnnnnnnnnnnnnnnnnnnnnnnnnnnnnnnnnnnnnnnnnnnnnnnnnnnnnnnnnnnnnnnnnnnnnnnnnnnnnnnnnnnnnnnnnnnnnnnnnnnnnnnnnnnnnnnnnnnnnnnnnnnnnnnnnnnnnnnnnnnnnnnnnnnnnnnnnnnnnnnnnnnnnnnnnnnnnnnnnnnnnnnnnnnnnnnnnnnnnnnnnnnnnnnnnnnnnnnnnnnnnnnnnnnnnnnnnnnnnnnnnnnnnnnnnnnnnnnnnnnnnnnnnnnnnnnnnnnnnnnnnnnnnnnnnnnnnnnnnnnnnnnnnnnnnnnnnnnnnnnnnnnnnnnnnnnnnnnnnnnnnnnnnnnnnnnnnnnnnnnnnnnnnnnnnnnnnnnnnnnnnnnnnnnnnnnnnnnnnnnnnnnnnnnnnnnnnnnnnnnnnnnnnnnnnnnnnnnnnnnnnnnnnnnnnnnnnnnnnnnnnnnnnnnnnnnnnnnnnnnnnnnnnnnnnnnnnnnnnnnnnnnnnnnnnnnnnnnnnnnnnnnnnnnnnnnnnnnnnnnnnnnnnnnnnnnnnnnnnnnnnnnnnnnnnnnnnnnnnnnnnnnnnnnnnnnnnnnnnnnnnnnnnnnnnnnnnnnnnnnnnnnnnnnnnnnnnnnnnnnnnnnnnnnnnnnnnnnnnnnnnnnnnnnnnnnnnnnnnnnnnnnnnnnnnnnnnnnnnnnnnnnnnnnnnnnnnnnnnnnnnnnnnnnnnnnnnnnnnnnnnnnnnnnnnnnnnnnnnnnnnnnnnnnnnnnnnnnnnnnnnnnnnnnnnnnnnnnnnnnnnnnnnnnnnnnnnnnnnnnnnnnnnnnnnnnnnnnnnnnnnnnnnnnnnnnnnnnnnnnnnnnnnnnnnnnnnnnnnnnnnnnnnnnnnnnnnnnnnnnnnnnnnnnnnnnnnnnnnnnnnnnnnnnnnnnnnnnnnnnnnnnnnnnnnnnnnnnnnnnnnnnnnnnnnnnnnnnnnnnnnnnnnnnnnnnnnnnnnnnnnnnnnnnnnnnnnnnnnnnnnnnnnnnnnnnnnnnnnnnnnnnnnnnnnnnnnnnnnnnnnnnnnnnnnnnnnnnnnnnnnnnnnnnnnnnnnnnnnnnnnnnnnnnnnnnnnnnnnnnnnnnnnnnnnnnnnnnnnnnnnnnnnnnnnnnnnnnnnnnnnnnnnnnnnnnnnnnnnnnnnnnnnnnnnnnnnnnnnnnnnnnnnnnnnnnnnnnnnnnnnnnnnnnnnnnnnnnnnnnnnnnnnnnnnnnnnnnnnnnnnnnnnnnnnnnnnnnnnnnnnnnnnnnnnnnnnnnnnnnnnnnnnnnnnnnnnnnnnnnnnnnnnnnnnnnnnnnnnnnnnnnnnnnnnnnnnnnnnnnnnnnnnnnnnnnnnnnnnnnnnnnnnnnnnnnnnnnnnnnnnnnnnnnnnnnnnnnnnnnnnnnnnnnnnnnnnnnnnnnnnnnnnnnnnnnnnnnnnnnnnnnnnnnnnnnnnnnnnnnnnnnnnnnnnnnnnnnnnnnnnnnnnnnnnnnnnnnnnnnnnnnnnnnnnnnnnnnnnnnnnnnnnnnnnnnnnnnnnnnnnnnnnnnnnnnnnnnnnnnnnnnnnnnnnnnnnnnnnnnnnnnnnnnnnnnnnnnnnnnnnnnnnnnnnnnnnnnnnnnnnnnnnnnnnnnnnnnnnnnnnnnnnnnnnnnnnnnnnnnnnnnnnnnnnnnnnnnnnnnnnnnnnnnnnnnnnnnnnnnnnnnnnnnnnnnnnnnnnnnnnnnnnnnnnnnnnnnnnnnnnnnnnnnnnnnnnnnnnnnnnnnnnnnnnnnnnnnnnnnnnnnnnnnnnnnnnnnnnnnnnnnnnnnnnnnnnnnnnnnnnnnnnnnnnnnnnnnnnnnnnnnnnnnnnnnnnnnnnnnnnnnnnnnnnnnnnnnnnnnnnnnnnnnnnnnnnnnnnnnnnnnnnnnnnnnnnnnnnnnnnnnnnnnnnnnnnnnnnnnnnnnnnnnnnnnnnnnnnnnnnnnnnnnnnnnnnnnnnnnnnnnnnnnnnnnnnnnnnnnnnnnnnnnnnnnnnnnnnnnnnnnnnnnnnnnnnnnnnnnnnnnnnnnnnnnnnnnnnnnnnnnnnnnnnnnnnnnnnnnnnnnnnnnnnnnnnnnnnnnnnnnnnnnnnnnnnnnnnnnnnnnnnnnnnnnnnnnnnnnnnnnnnnnnnnnnnnnnnnnnnnnnnnnnnnnnnnnnnnnnnnnnnnnnnnnnnnnnnnnnnnnnnnnnnnnnnnnnnnnnnnnnnnnnnnnnnnnnnnnnnnnnnnnnnnnnnnnnnnnnnnnnnnnnnnnnnnnnnnnnnnnnnnnnnnnnnnnnnnnnnnnnnnnnnnnnnnnnnnnnnnnnnnnnnnnnnnnnnnnnnnnnnnnnnnnnnnnnnnnnnnnnnnnnnnnnnnnnnnnnnnnnnnnnnnnnnnnnnnnnnnnnnnnnnnnnnnnnnnnnnnnnnnnnnnnnnnnnnnnnnnnnnnnnnnnnnnnnnnnnnnnnnnnnnnnnnnnnnnnnnnnnnnnnnnnnnnnnnnnnnnnnnnnnnnnnnnnnnnnnnnnnnnnnnnnnnnnnnnnnnnnnnnnnnnnnnnnnnnnnnnnnnnnnnnnnnnnnnnnnnnnnnnnnnnnnnnnnnnnnnnnnnnnnnnnnnnnnnnnnnnnnnnnnnnnnnnnnnnnnnnnnnnnnnnnnnnnnnnnnnnnnnnnnnnnnnnnnnnnnnnnnnnnnnnnnnnnnnnnnnnnnnnnnnnnnnnnnnnnnnnnnnnnnnnnnnnnnnnnnnnnnnnnnnnnnnnnnnnnnnnnnnnnnnnnnnnnnnnnnnnnnnnnnnnnnnnnnnnnnnnnnnnnnnnnnnnnnnnnnnnnnnnnnnnnnnnnnnnnnnnnnnnnnnnnnnnnnnnnnnnnnnnnnnnnnnnnnnnnnnnnnnnnnnnnnnnnnnnnnnnnnnnnnnnnnnnnnnnnnnnnnnnnnnnnnnnnnnnnnnnnnnnnnnnnnnnnnnnnnnnnnnnnnnnnnnnnnnnnnnnnnnnnnnnnnnnnnnnnnnnnnnnnnnnnnnnnnnnnnnnnnnnnnnnnnnnnnnnnnnnnnnnnnnnnnnnnnnnnnnnnnnnnnnnnnnnnnnnnnnnnnnnnnnnnnnnnnnnnnnnnnnnnnnnnnnnnnnnnnnnnnnnnnnnnnnnnnnnnnnnnnnnnnnnnnnnnnnnnnnnnnnnnnnnnnnnnnnnnnnnnnnnnnnnnnnnnnnnnnnnnnnnnnnnnnnnnnnnnnnnnnnnnnnnnnnnnnnnnnnnnnnnnnnnnnnnnnnnnnnnnnnnnnnnnnnnnnnnnnnnnnnnnnnnnnnnnnnnnnnnnnnnnnnnnnnnnnnnnnnnnnnnnnnnnnnnnnnnnnnnnnnnnnnnnnnnnnnnnnnnnnnnnnnnnnnnnnnnnnnnnnnnnnnnnnnnnnnnnnnnnnnnnnnnnnnnnnnnnnnnnnnnnnnnnnnnnnnnnnnnnnnnnnnnnnnnnnnnnnnnnnnnnnnnnnnnnnnnnnnnnnnnnnnnnnnnnnnnnnnnnnnnnnnnnnnnnnnnnnnnnnnnnnnnnnnnnnnnnnnnnnnnnnnnnnnnnnnnnnnnnnnnnnnnnnnnnnnnnnnnnnnnnnnnnnnnnnnnnnnnnnnnnnnnnnnnnnnnnnnnnnnnnnnnnnnnnnnnnnnnnnnnnnnnnnnnnnnnnnnnnnnnnnnnnnnnnnnnnnnnnnnnnnnnnnnnnnnnnnnnnnnnnnnnnnnnnnnnnnnnnnnnnnnnnnnnnnnnnnnnnnnnnnnnnnnnnnnnnnnnnnnnnnnnnnnnnnnnnnnnnnnnnnnnnnnnnnnnnnnnnnnnnnnnnnnnnnnnnnnnnnnnnnnnnnnnnnnnnnnnnnnnnnnnnnnnnnnnnnnnnnnnnnnnnnnnnnnnnnnnnnnnnnnnnnnnnnnnnnnnnnnnnnnnnnnnnnnnnnnnnnnnnnnnnnnnnnnnnnnnnnnnnnnnnnnnnnnnnnnnnnnnnnnnnnnnnnnnnnnnnnnnnnnnnnnnnnnnnnnnnnnnnnnnnnnnnnnnnnnnnnnnnnnnnnnnnnnnnnnnnnnnnnnnnnnnnnnnnnnnnnnnnnnnnnnnnnnnnnnnnnnnnnnnnnnnnnnnnnnnnnnnnnnnnnnnnnnnnnnnnnnnnnnnnnnnnnnnnnnnnnnnnnnnnnnnnnnnnnnnnnnnnnnnnnnnnnnnnnnnnnnnnnnnnnnnnnnnnnnnnnnnnnnnnnnnnnnnnnnnnnnnnnnnnnnnnnnnnnnnnnnnnnnnnnnnnnnnnnnnnnnnnnnnnnnnnnnnnnnnnnnnnnnnnnnnnnnnnnnnnnnnnnnnnnnnnnnnnnnnnnnnnnnnnnnnnnnnnnnnnnnnnnnnnnnnnnnnnnnnnnnnnnnnnnnnnnnnnnnnnnnnnnnnnnnnnnnnnnnnnnnnnnnnnnnnnnnnnnnnnnnnnnnnnnnnnnnnnnnnnnnnnnnnnnnnnnnnnnnnnnnnnnnnnnnnnnnnnnnnnnnnnnnnnnnnnnnnnnnnnnnnnnnnnnnnnnnnnnnnnnnnnnnnnnnnnnnnnnnnnnnnnnnnnnnnnnnnnnnnnnnnnnnnnnnnnnnnnnnnnnnnnnnnnnnnnnnnnnnnnnnnnnnnnnnnnnnnnnnnnnnnnnnnnnnnnnnnnnnnnnnnnnnnnnnnnnnnnnnnnnnnnnnnnnnnnnnnnnnnnnnnnnnnnnnnnnnnnnnnnnnnnnnnnnnnnnnnnnnnnnnnnnnnnnnnnnnnnnnnnnnnnnnnnnnnnnnnnnnnnnnnnnnnnnnnnnnnnnnnnnnnnnnnnnnnnnnnnnnnnnnnnnnnnnnnnnnnnnnnnnnnnnnnnnnnnnnnnnnnnnnnnnnnnnnnnnnnnnnnnnnnnnnnnnnnnnnnnnnnnnnnnnnnnnnnnnnnnnnnnnnnnnnnnnnnnnnnnnnnnnnnnnnnnnnnnnnnnnnnnnnnnnnnnnnnnnnnnnnnnnnnnnnnnnnnnnnnnnnnnnnnnnnnnnnnnnnnnnnnnnnnnnnnnnnnnnnnnnnnnnnnnnnnnnnnnnnnnnnnnnnnnnnnnnnnnnnnnnnnnnnnnnnnnnnnnnnnnnnnnnnnnnnnnnnnnnnnnnnnnnnnnnnnnnnnnnnnnnnnnnnnnnnnnnnnnnnnnnnnnnnnnnnnnnnnnnnnnnnnnnnnnnnnnnnnnnnnnnnnnnnnnnnnnnnnnnnnnnnnnnnnnnnnnnnnnnnnnnnnnnnnnnnnnnnnnnnnnnnnnnnnnnnnnnnnnnnnnnnnnnnnnnnnnnnnnnnnnnnnnnnnnnnnnnnnnnnnnnnnnnnnnnnnnnnnnnnnnnnnnnnnnnnnnnnnnnnnnnnnnnnnnnnnnnnnnnnnnnnnnnnnnnnnnnnnnnnnnnnnnnnnnnnnnnnnnnnnnnnnnnnnnnnnnnnnnnnnnnnnnnnnnnnnnnnnnnnnnnnnnnnnnnnnnnnnnnnnnnnnnnnnnnnnnnnnnnnnnnnnnnnnnnnnnnnnnnnnnnnnnnnnnnnnnnnnnnnnnnnnnnnnnnnnnnnnnnnnnnnnnnnnnnnnnnnnnnnnnnnnnnnnnnnnnnnnnnnnnnnnnnnnnnnnnnnnnnnnnnnnnnnnnnnnnnnnnnnnnnnnnnnnnnnnnnnnnnnnnnnnnnnnnnnnnnnnnnnnnnnnnnnnnnnnnnnnnnnnnnnnnnnnnnnnnnnnnnnnnnnnnnnnnnnnnnnnnnnnnnnnnnnnnnnnnnnnnnnnnnnnnnnnnnnnnnnnnnnnnnnnnnnnnnnnnnnnnnnnnnnnnnnnnnnnnnnnnnnnnnnnnnnnnnnnnnnnnnnnnnnnnnnnnnnnnnnnnnnnnnnnnnnnnnnnnnnnnnnnnnnnnnnnnnnnnnnnnnnnnnnnnnnnnnnnnnnnnnnnnnnnnnnnnnnnnnnnnnnnnnnnnnnnnnnnnnnnnnnnnnnnnnnnnnnnnnnnnnnnnnnnnnnnnnnnnnnnnnnnnnnnnnnnnnnnnnnnnngatagccttatagtatatctttataatactatatcttctaatactatctataagctaaagagtaatctctcagctactatataagtagattttatacctattaatcgcctttactaagtagggtattccttttatatcttctagattctcctttacctatctttagctaataaaggtttaggtagccctactattaattagaattctagtaacccctattagggcacccttataaatatctaagataagtatattatatactaatatactttagcccttctactaaccctccctaaggattactcctagtactaccgcggcctatagtatagggttatctatttttttagttcctttaagttattcttctaaagctacttagcttttaggtaaacccttataatatatctagcttccttatataagtaatataagtcctttacctagttatctaattttactctctagtcttacttcctcttattaaaggataataactattcctttcggctatcctataaggtagatagttcttagccttagtctaataacttcttactattatcttttaagtctatattcctattctacctatataagtactacttagcctatagctttataatatataaaggtatctagctctctataaagctaaggtaggctacttatttattatagatctctatcttagataggtcctactattaggctttagtttaaatctcttttaaaatacctatctctaggtagttaatatatacctaatctaataatatagagtataagtagttatagatccctattagatattaggtatattaatatatactctattctagcttttatatagcttactactaattagcttttactttatactataactatactaagtctataacttaggttaaggcctaagttttgaatatatcctatataatctactttataggattattcttttaatattatatctaaccttaggtaaccttatttaagaggaattctattatttatataacccttactttatctaaggcgaactattataggtatcttacttaaaatacttcttattttaccttaaatatatcttacttatctatagttttactatagaatactagtatattaaataggctttatagctccctaacttaggagattttactactttatactatacctatattattattacagtcccctactactattaggaaagattagggtatcgctaatatccttaatatagggtttaggggttctagtacctaggtagtatctcccttaagtagtagtagatatagtatacttaattcctcctctaaggtaatagctgtaagattctaattataaaggtataataagagtttagctttttagtcggtaattataagccgttttttaagggccttaaggtcttactatttagctataagccttcttttattttctctaatatccttatcggaggattctatcggttaggcggccccctcttctataggaatagctctttcggtaggtatagcccctatcttagtagggatttataaatcctatatttagttttcttagctagtaggtagggatatatctccctataatacctagcttctactataggtattttaaggtatcttataggttctagtagtctaatttataaaataaagtaattagaatattaggactagctaccagtatatcctaaaaatagaggttcgaattagagtaaaggtccctagcgtaggtcatataattcagtagactaatcgctaaggttctaaatctcatatacacagtatatatatacccctggcgcttacttagtaagtacatcggcccatataggccagttgtgtaagtgaccctcagggtcataacaaatattgactttattatagggttaccccctataaagtagtaggataaggtctataatatacttataattatagttaatatagaggactaggtcctaataaagaatatatatattaacttaagaaaaccttataagaaactagactactattatataggacccttttaggttataagagtagtagggaaataagcctactaattaatcctactacctaggtattataggatatatcctatataatatatatctttattaaaaccctttaaaggtaacctataaataggctaagagagattagaccctattatagttaatagagaattagaatatattatagaatatattcttaaaagctactataaagaggtagagtatctaattaaatagaaaggctataaagatattaagaatatataggaaccttaggtatatatagaagaaattactatattagattaatttaaaaaagaagagtatataagactatctataaaaactaaaagggggtaacctataaagaagaagaagataagctaagattataaagatactataagaagtagtatatattagtaggaatatgtcagaatctaggatgaatactgtcatttttcatccctgatacagttggatcacgtgactnnnnnnnnnnnnnnnnnnnnnnnnnnnnnnnnnnnnnnnnnnnnnnnnnnnnnnnnnnnnnnnnnnnnnnnnnnnnnnnnnnnnnnnnnnnnnnnnnnnnnnnnnnnnnnnnnnnnnnnnnnnnnnnnnnnnnnnnnnnnnnnnnnnnnnnnnnnnnnnnnnnnnnnnnnnnnnnnnnnnnnnnnnnnnnnnnnnnnnnnnnnnnnnnnnnnnnnnnnnnnnnnnnnnnnnnnnnnnnnnnnnnnnnnnnnnnnnnnnnnnnnnnnnnnnnnnnnnnnnnnnnnnnnnnnnnnnnnnnnnnnnnnnnnnnnnnnnnnnnnnnnnnnnnnnnnnnnnnnnnnnnnnnnnnnnnnnnnnnnnnnnnnnnnnnnnnnnnnnnnnnnnnnnnnnnnnnnnnnnnnnnnnnnnnnnnnnnnnnnnnnnnnnnnnnnnnnnnnnnnnnnnnnnnnnnnnnnnnnnnnnnnnnnnnnnnnnnnnnnnnnnnnnnnnnnnnnnnnnnnnnnnnnnnnnnnnnnnnnnnnnnnnnnnnnnnnnnnnnnnnnnnnnnnnnnnnnnnnnnnnnnnnnnnnnnnnnnnnnnnnnnnnnnnnnnnnnnnnnnnnnnnnnnnnnnnnnnnnnnnnnnnnnnnnnnnnnnnnnnnnnnnnnnnnnnnnnnnnnnnnnnnnnnnnnnnnnnnnnnnnnnnnnnnnnnnnnnnnnnnnnnnnnnnnnnnnnnnnnnnnnnnnnnnnnnnnnnnnnnnnnnnnnnnnnnnnnnnnnnnnnnnnnnnnnnnnnnnnnnnnnnnnnnnnnnnnnnnnnnnnnnnnnnnnnnnnnnnnnnnnnnnnnnnnnnnnnnnnnnnnnnnnnnnnnnnnnnnnnnnnnnnnnnnnnnnnnnnnnnnnnnnnnnnnnnnnnnnnnnnnnnnnnnnnnnnnnnnnnnnnnnnnnnnnnnnnnnnnnnnnnnnnnnnnnnnnnnnnnnnnnnnnnnnnnnnnnnnnnnnnnnnnnnnnnnnnnnnnnnnnnnnnnnnnnnnnnnnnnnnnnnnnnnnnnnnnnnnnnnnnnnnnnnnnnnnnnnnnnnnnnnnnnnnnnnnnnnnnnnnnnnnnnnnnnnnnnnnnnnnnnnnnnnnnnnnnnnnnnnnnnnnnnnnnnnnnnnnnnnnnnnnnnnnnnnnnnnnnnnnnnnnnnnnnnnnnnnnnnnnnnnnnnnnnnnnnnnnnnnnnnnnnnnnnnnnnnnnnnnnnnnnnnnnnnnnnnnnnnnnnnnnnnnnnnnnnnnnnnnnnnnnnnnnnnnnnnnnnnnnnnnnnnnnnnnnnnnnnnnnnnnnnnnnnnnnnnnnnnnnnnnnnnnnnnnnnnnnnnnnnnnnnnnnnnnnnnnnnnnnnnnnnnnnnnnnnnnnnnnnnnnnnnnnnnnnnnnnnnnnnnnnnnnnnnnnnnnnnnnnnnnnnnnnnnnnnnnnnnnnnnnnnnnnnnnnnnnnnnnnnnnnnnnnnnnnnnnnnnnnnnnnnnnnnnnnnnnnnnnnnnnnnnnnnnnnnnnnnnnnnnnnnnnnnnnnnnnnnnnnnnnnnnnnnnnnnnnnnnnnnnnnnnnnnnnnnnnnnnnnnnnnnnnnnnnnnnnnnnnnnnnnnnnnnnnnnnnnnnnnnnnnnnnnnnnnnnnnnnnnnnnnnnnnnnnnnnnnnnnnnnnnnnnnnnnnnnnnnnnnnnnnnnnnnnnnnnnnnnnnnnnnnnnnnnnnnnnnnnnnnnnnnnnnnnnnnnnnnnnnnnnnnnnnnnnnnnnnnnnnnnnnnnnnnnnnnnnnnnnnnnnnnnnnnnnnnnnnnnnnnnnnnnnnnnnnnnnnnnnnnnnnnnnnnnnnnnnnnnnnnnnnnnnnnnnnnnnnnnnnnnnnnnnnnnnnnnnnnnnnnnnnnnnnnnnnnnnnnnnnnnnnnnnnnnnnnnnnnnnnnnnnnnnnnnnnnnnnnnnnnnnnnnnnnnnnnnnnnnnnnnnnnnnnnnnnnnnnnnnnnnnnnnnnnnnnnnnnnnnnnnnnnnnnnnnnnnnnnnnnnnnnnnnnnnnnnnnnncaaaggaaatactaagagcttcgaggatatagcttataaaggaggggggtaatattacaaccccgagggttacttatacaactagcctatataggccgatatatttactaagtaagcgctaggggtatatatataccgtatatatgagatttagaaccttagcgattagtctactgaattgtatgacctacgctagggacctctactctaattcgaacctccattttcaggatacgctggtagctagtcctaacaggctatatcaatagcatcgaccgggcgcttttacggtagaggacgcgagggagtaccttcttctatatcacagatagcaatcactgcattgattacagtaattcggcgttcagtttctttctcgactatcttccctggtatcgtcaagatactatcgataagcgtcatatactgcagtgtcatatagcctgtacactatagcgcccctataacttctttgttaacaacttttccggaaagttaccgcttactatcaatcaccggctactcattcttgtaccgcttaagattttcacaaatcaatcggtacttttaccatctcacaaatcaatcagtgcttttgccatcccttttcgtttcgtagttactttactacacgattatactactcgtctgtataatcaaatttctggtataactttttgatacctttctcttaagccttctaccgcttacagagtattcgggaataagggctactccgcggtaggttatcgccgaactcctactgtaatatagcctaggtatctttataggtacgcttctgtaacggataaaggtccgtacaagagggaaacacatgtaaacctgcacaggctcgggaaggaacatctatgtcatcatacatctgtttcgatgtcgatccgtacatctttgctattaaaaggggtttttagggtgaaattctaacttaaatcgctaccctggcttagggggggggttagcgtttaaagataaatattgagttttaaaagtacccgattaggtaaaaaaggtattaaaccagctactaagaagctatttttaattgtctccgatttaaaggctttaatttatatagaggggtatactttaaggaattcaagtttattaatatagttaatcctagtctatatttttattttaactaaccggctgtataactgttttactactataaaataaccgatattgagaggttataaaaggtaagaggaatatagtagtatataaattagtataatattattttactcgtaaatttaatcgaattaaggggttaaatagcttctatagctattaagtactaaaagtcgataccttcctactatatataataaagttaatagtataaagagtttctaaagctagcgaagtctaattttattagaagtctaactgtttagactaactttaaaccgctaatcgctaggaaggcctttaaactatgatttaaggaagaccttacctttaaaaataatatatagagggagggcctaccctactgcgtttatatattcaattgcagttacctacttataatttctaggttataaaagtgatctctaactatagtatttacttcttattataacctttactattatagttaatcctattataaatctagtcttatcgaagttatagatattatctagattaattctaaattaaagaatggttttttaaataagattaaactattctctaatgatttttagatctttacatttcgcatacttataattataatatcttaagaaccaagaagaaagaagagggtatcgttttataaaattataaacctatttttcgctaactaaaagaactagggtagttctacactatttaagaagaagattcgccatttctcatactatagagggccggggggctactctataagaatctatagagagaatccatttttgaagagaattctccttagtttctatcaatttctgtaaatttgtgtacgtagtacttcgttaagaacggccagagaggcagtcgcgtaaagttatacgcgggacatcaaaagtatatgtagtaagagtaatcgagctgatatctttattttgaagagcctggatagctaataaaagcctaccctcttactgttctaatttactagcggattgagagcgctttggtggcatggtgggtggttgaactaactaggtactgattcatggacgcgtttttgggtggggtggcgactcgtttacagtggcgactcgtttacagtggcgactcgtttaccgattacgttatgggcctaacgaatgactaatctacaatctgttcttagcgcatctttccggcactgtagatattccggtaaccgaattaccacaggcctgttcattccgacaggaaccaagcatattggcctcaacattatgacgtcacatgataaatctatctgtaaggccgacatcaactctggcagttttgacatcttggacgtttgaggcaagatcttgacatgattaatttcaacagcccagtatttcacgtgctcgctcgttactaccgataagtccctggaccctggctctggactccccaatcatgtccagtcttcacgagctccttcaccgacagcgaccaggacgatggcaagaattccgcgcccggccttgtgtcttcctcgcaaaaatgctttatggttggtacgagcctattccagctacgccactcacaaaacctatcgcggttgtctgtatttccgatacccacaacacccaaaccgacgtccatgatggagacatcctcatccatgctggtgatctcacacaatctggatcttttcaggaacttcaagattcgatcacctggctacgaagcctacctcatcctaccaaaattgtgattgctggcaatcatgacctactacttgattcagcgcgggatgatgtgtctggtcgagcagcctccgagcgagctcaaatcgactggggagatataatctacctcgaaaacgaggaagtaacaatttattgcccaaatggtcgtcaactgagggtctacggaagtccctactcttgccgccatggcaactgggcctttcaatatccccggaatcaagatgtatgggctggctcagtaccagatggaattgatgtgctaattactcatggtccaccacttgctcatcttgacttactgaagtatggctgttcttatttgctacagaccttatggagaattcggccaaggctacatgtattcggccatatacatgagggttcaggaactgagttaatgctgttcgacaggctccaggaggcgtatgagggaactgtcgccgctggagggggcttgaaaaatctactgtttacagcctgggagtttgctaaggaagtcctacgcccagccgtggaagcaaaatgtttacttgtaaatcctgccattgttggagggttacgggataatgaacgaaggttgcctatcaaagtttttatctaattttacaatcttgctgaccaactatattgaatcccacctgtgcaactgtgctatgcatgcttccgtgcccctattatatggactcgtcatttcttctctgcacatggtgatgaatttctcgctttttgagggtatacttatctgtccgatgaatcaccgtgatatgtatcccgatttgtattcatgatagctacttaaataaacaaacccgctgcaataatatcactggatactgaggtaaaacttagtgtgcctttctcctcctaatttttggcatcgcaaacaaagaaaggttctcggaaaggttagctagaccgcagggaaagtacggaggagatagtacgaggttattgctttatttttcaagcctaaagtctctactggtatctcattcctgtgctcaatgtgaagaatcatgtgatatgcgcgactgaacaagggttataggaacacgctgccccaggctacatgctgtttctctaaagtagttgtttccctaaagtagttccgtatgctcctgccaaaatgaattcgagtatccacgaatgactggagatacacgagtcgactggaagctggtagatctgtattcaaaacttccacgttgattaaaatgggtcagtcgctgtccactctccgctggcgtcgcagtgctcgtagcctacaagagctagccgctcgaccagccgcgatacgcgacctgagtccgaatctgtcttgtgaaattctcatttctgccctcgagaatgttgccaaatacacttcagccaagaaccaagacatcactctcgttgtcgttggtggaatcatcaatacaatcttcctcagaagtcgccctgaaactcatgatgtcgattttttcaatgacaatcttccacccgccacgctcaggtgcctttcgaaggcagccaagtccgctttcaaaaggaatcgtatactcggacgggggtggctcaacaaccatgttgttctcttcgtcccatcccatatacgacgtattctcctcgatgaagcgcttgagcagcacgaagttgtttttcaagcccctggacttactctcttagctgctccttgggaattccttttttgtaccaagttgcatcgactgtctggaagaggtgttagcaccgcaacgtcttatgatcaggaggacgcggttcattacttggagaagtacatttcacttcaatctaccgccgctgtagcccagggaactgttaggttttggtttggacagtatttacttgattggaccacagaaacagaggagctgctcccgggtgtgaactccatgtaccagaccacttttcatgttgagcatgatccaatcattcttagttcttaattcttgccttgattgatctcaatacatattgattactcacggtctagctaatctcctgattccagggaagaggtccaaccactcggatgttccaagtttcaactgcgcatcaagttttacggtcttagtcgaaatgaacctctacgtgatgggcataaatagacgattaagtatgtggaatcaagagatgatctcattagctagctagacgtatgaagtaatacgccgcgctaaacctagagagtagatgtcaaacttagaagcgtatttcgtagtacctctccgatatggtgtagtggctaacatcgtcgtctctcacgcgacagccgggagtttcttttgccggcagcggcagcgtaaatagttagcactccgaggcaacctgctgattgactaattagtcactcttcaatctacaggtattgggcccgagtcccaaagttgaaaccctaaattaaggacaagtgtgatgatgaaatagaactatccaagagcagataccgctatttatagtcaacgtcgctgcctaataagcagctacttctacccgtgaccgcccgaacgaacaggagctccgagagctagttcgtcggagtgatagtcacgtataggtctcgcctaagctatagggcaatctagtgggttgcctccgttagccacgataaccctgacacttgaggtaatacatgtaactacatactcgtgattttccccctcaattttagaccgctatttctaagaatctgactgattagatacttttagctacgggaagtgtccgtcccacccaggtgtatggtggatcccaatcattcaatgccatcaaccctctgcgtattctcggtcggtagatgcgtatgttgactatcccaaatcaatcttcgacccctagagcatatacacaatttccggatgaagatcaaccagaagatcaacgactcctgccaagtggccaccgaaatcatttggtagattgtattgacgtatttgtcaaatatacgatcttgataagctaataataatgatatttacttaatatatcgggctttttgatgatcactttagcgaacgggaagaagataagaggttaaataagagaagatgaatactaccataggaagctagataattcactactgcgcattaagatatagaacgaaacgcgaggaatgatgctatctacctgaagcttttagtagatcttacaaactagcgaatatacggaaaagagaatcgaagtgatatatagatatatccgtggaagttgaccgctgttaaagggtcgtttctacgagctacttgctggtgagatcctatacagcgaaccttctgggcccaaacctaacgatccgaataccatcaaagctcaaatcctcctgtgacgatctaggaaggatcgtacttgccaaacgaggcaggaacagtcacgtcctcgtacttgccaaacgggaattaagcgaagacaaacgcgagggtataagaagggaagaacgcgcactcagatagtttctctttttcctttctcctccgtacttagaatttggttgaattacactcctttcttctgaatcgaattggctcgtaacacctccgacaacataaggcagaccataaatttgaagacaccttgaataaatttggttatataatacttccagttgtggttacgtgcacatgccaagatgccgagcgtttcagagggaacggaacgatccaatgacattcggttattgttcagccgaagaggtcagtgcagtggtcgcgcgacttgggtgattctcaccctgattctcaccctgtctatagcgcactcatctttatcacccccgatcgcgcgaccgtaaagcggcgctcacccatttctcacccgggcgacacccacccaactattgactgcatataagccacacgtcggtgagttagtagttgggtgggtgaccaccagcgaatcctcactgttgtatgtttttcttccttttttgcacctgaattagatcagaccaatcactcgcactcgatggtttttttttaagactatgtatgtattgaagaggggaccctgggataggggcaccgacagccctgcctgcgaaacaggtgtgagagcagagtcgtcactgggagtagtagggtgctagagaggagaacacaatggggtaactactgagaagtgaaagtggaaaggtgtctgcgttgctatctccgcctctggggtgcttttatatcacatgaccgcctagtcatcctgctctggaaacccccacgtgcagtatggatgtagttagtggaatgtagtcgcttgtaactttcttcaatcacgaaaacggctgtctccactggtacaggaggcagtctgtggttggccatgtctaccctaattgggatcctttctgtttatttttctcgaggctatctttcatccaaggtctaagtagtccaagctgatcagccagatttcgggtataccccatacatatcacgtgatgcgcttccccacggctttcctattccggccttccccgcacttctgcatatccatctcgcaccccgagcatttcggatagccacggttaagggctatgcggaactggtatggcaatcccggctctttaaaatggcgtttctccccgttttgggtttcctgaattcaagcgattcagcgttgttctcccccttggacttggaattgtgaacccgtcaatcattattctctaagcgtataacactcatcacctaccatttgtcttcggcatcagacagcaaattacattgatcaagaaaatgagtcttcgaacagccgtgtctctcccgcgcagggcgacttgtttctctgcgtccgcagtgaacgcccgacgctggccgtccagcaaggcccgagccttttccacaactacgcaacgcgatgcgacgtgggggtttatcgggctaggacagatgggtatgttttgagatcggccgcgaggacctcgggtatacaacctcggctatacaatggactgtgggatgttgtttccaactgcattatctaactacattaggctaccatatggccaaaaacctgcgcgccaagatccccgcatccgataccttgatcgtgcgcgatgtcaacgaagatgttatgaaacgattcgttgcagaggctcgggaggccgcacaaaacaatggcgcaggcgtcaatgaaggccaagtcgagatcgcgaagagtgcgcgcgaggtcgccgagaaatcggtgagtggctaccacccctacgggttcagcctgtggctgagctagtggcttctctgcataaaccgcgcttcatatacttgtgtccttctagggtctgataaatatgcttatctctgtctgccgtttagatagtcatggttaccagtctcccagagtctcaacatgtcattgaggtgtttcattctatccttaaagatggagcgctgccaccgctcgagcaggagcgtctcttcatcgacgcatcgaccattgaccccgtcacatctaaggatatcgcaaacgccatccacaccacgcaaaccggccgattcgtggatgcccctgtatcgggaggtgttgtcggtgctcaggcaggaacgttgtcattcatgtttggcgcctcttcacaatcaagcgagctgcttgaacgcatccgcagtgtcctcgctttgatgggtaaaaaagcttggcatcttggtgagcccggcgctggcgtgtctggcaagctcgccaataactacattctggctctgaacaatatcgccactgctgaggctatgaacctcggtgttcgctggggactcgaccctaaggcgttggctgaaatgatcaattcgtctactggtcgttgctggccctctgaggttaacaatcccgttcctggtgtcgttgagacagcccccgcatcccgtggatatgagggcggattcggggtgagccttatgcacaaggatcttcgtttggctcttgcggctgcggagcagtctaatactcctctcgccctgggtgctcaggctcgtgaggtgtacaaggctgtcgaggaggagtatcgtggtaaggatttctcggtggtttataagtggttgcaggagaagtctcaataagttctcctcattttaggtgaagtttcctgggtatttttcctttcgatgtctcccccgactcagtacctgctgctctttctcatagatgtggatttcaggatataaaattacaatatagcattcttctactcaatggaattgagtctaggatttccattttgtgtttctacatcttcagagcatatacaatattcaatatcaatggttgatgttctgcagctttcaggtacacgggatatagttgtctctcgccccatgtgacttccctttctctttcccccccaaacacgccaacgcccctcatagctccttctcttcctattcttacgctctttccttatccgacatctgccattctttcttcttgcgtctcctcccatcctctcattccacctccatcctattccttcatccccctatccctccatttactctgccatcggtcctgtcctggcccatttatccccttgtcgatttcaaggtcatccagactttcattccgtatacctcatccccacctacctcttccttcgtttcgagttatcatcagacgccttgtagcctgaacagacggaaggttgcatcctcgacaacaagtaagtcttccactcaattttgccatgtcctactagcctaccggtcctcgttctggctgacactggcacacttggatagcagctagactttcttctcagaattgtctatataatttggtgcaggaactcaggtgagtttcctgcggttggcactatgccattgaggaattttgtcaaatggaggctaaaggggctgcccatcaagccttcttcttgtctgccaattccaaagaatcagctgacaaaatccttctctttcagcatacgcccttcgtcatgcaccctcagggctctcaacacacaagctcctctggttctggctcttgtcagacatcaagctcccagtctgcacaatacccccaagagcctcgtacaccctatggtcccaggtaccaccaatctaccaatccgagttctattgacagcagtggtgcaggcctgaccaatcttttcagaggattaaatctgcagaactctcgtcccaaattcaacggctcaaagggcaccgcacccgttcaaatgaacacaaacatggactggtcgaataccaaccgtgcatacaacagcccattcatcctggttccgaattccaccgttttcaatggcgttccgaccgtctcttcctttgttcctaacggtgtctctggtcagactgatcagatgggccaattctcgtatcttccaacgggagtctaccccaacgtcaatcctgtgatggctggtggatactcgtcgtggccctacatgatgaactacgacatgcaggatgggacgaccaacaagcaagcatgggtgtctgagggccagaagggagttcagggggagaacaatggacaaataaattactatccctctgctcttgtttctggcatggatggcagttccatgtctggttactcttatggaggcatggttccctcgcagcttgggtcgctctcgcttcccctccaaatgatgaagactcccaacggttacgtcgttcaagatctggaggctctaactcaacaagatcctgccatcccacgcgcggtgcctgccatgtggactaacccgtctgagctgacactcgccaagtgtctggaaaatcgcgagggtataaccaatgtctacatccgaggattcctgcccgagaccactgatgagatgttgcatgcctacgcagctcgtttcggaaagattgagcgttgcaaggccatcgtggacctggataccagtctttgcaaagggtacctactccacaaaacttctttccgataatttattctaatcttttgcagattcggttttgttcagtattacagcttcgaatcctgcgagaactgcattcgcggtttcttttacctcggctaccaagccagcttcgcccagaagtctcgcaactctcgcctgaaggatctggaggacaagtcttctaccaatatatactgcaccaacattccaatcgattggactgaagccgtgagttatacaaacccccacacgcttgtctgtcctgttgaattctaattagtttatcaggacctgcgtcgtcatttcgagccatggcgtgtggtttcggaaaagatcagtcgcgatgagaagacaggtgtgagcaaggaagtgggctttgcacggtaaaaaagcaaattccttccttgactctcatgaccttttctgactggtttacagcttcgaaaaccgtgatgttgccgaaaaggtcctgatggaattccacaacgtcaccaaggacgatggggtaaagctgcttctgcgctttgctgataccaaagcgcaaaagatcctgaagcaacagagcaacgaacgtcgtgcttaccgcgccggagaatataactactcggttgaagtggttcagggatctactccatcccctgggatgaaacgtggctctcatcttactccaaactctcaagtcagctatacctctccagctggtgtgggcgctaactggaccccggcaacttccatctccccttggtatgtctaaatacttgaactgcattccaaaactcattctaatcgagctcacagtcacccgcacatgaagaatccatccagcagtgcacgaagcagttccttgtcgtctcggagcctcaatgctcttgaccacacgcccgcctatcgcagtcgagccttgtccctgaaccgcggctcttacactgatctctctggtggttcttccaagaccgccatgccggactcgccgactatggggtctcgtaaagagaacatcagagcgggctctgtatcccccgcttcttcttctcccatgatcattctctccccagctcgctcgtgcacttaaaccagccgtgcaacgtgctcccacgcatatatgtatttgcatgggatgctttacatcatcttatcactcggggtaagatgatcagcacctctccagggtgctctccaatatccaaatgcgcagcatctgttaccattcgcagaatgtatcgacgatgtatagctcagccttgcttttttatgattgttctacgattcacgattcatgattcacgatatgatattcggttgctttctgtttacgacccttcgtggcatttttagatgactctacgcggtatcattatggagttcgatctgcatttttatcaagtttcatgggaggatgggaaaagctttttttctttctttcgcagttatatggactttacatgttttcagcatatgtgacagacaagatgcatgtttcaagacttcgttcaaagaacgctatcgcaccttattgggttgcgcagtctaatatgatattattcaagatgaaaaatactccatgtaaggtccatgttcaagatccaaagtgcgtgagcacaattgtgacgtggagggcaatctatccgaaaaggctaatgagataggaatctcgatctacacaggtaagacaatccacattattcgggtcaattgcgcccaagtctctcctccagatcctcggtgagctgataagcaggaagatactgtccatcaagctgagccccaagccgcaatctcggattaggatgggtatcagacgtgccaccaagactagtatatccctcgtcataaagcgaacagtacttcaaatccagatgccgaatgaacgcccagatctccgcataatgccaatcaatcatgggatgcacgcgtacgaaatccggccaccccccgtccgtccgatcaaagtgcgtcagctgtgtgccatgcggatccgtccgccgcgtaccaacaaatatcgcccggatcccagggtggtgcgccagataatcctcaaagctcgagcggagcgtcgaagccggcggcgcagtcgtgtactttgcaatatcgagatgataagctttagcggaggagatgacgaagtcttcgacttcatcgaagggatcaggtgggagggcataaatcgccgggatgaccttcgccgcggctatctgggcttcggtgtcgaggtctgcgggggagggggttgtatcggttgtgtttgcatttgcggtggggtgtgggtcattgccggcatggattggatgcaacccggccagaaacagaattagcaggactagacagtccttgccgccgttgtaggagacggatagttccgagagcttgtatcgctgcagcgcggtgctgactacttctagggagatgcgcgtctgccgttgcacggaggccagcagcgtgtccggggcgtggggttcgtttaggaaggcttgtacgcgggcgtggatgcgtgagatcacggtggggagaggaggaattgtttcatcgctggttgagtcgttgaggggttgtttgttgctgtgaggtgttccattctggttcggctcgggctcttggttgggaggggctgatggtttcaatggttcggatgttgctggtggtagtggtgggaatggttgaaggtgatcttgcggccggaaaggcgcatgttttggagttgtttcagtcatgcttgtgttgaggtgaggttgacggagcgaggtttggggcggggtgtgggtttctcggggagacacaacttaatccactgcggggatacaaagccgatgtcaagcatgtgtagacatactctatgtatacatagatctagataattgaaggtcgatataaaccaatttgggaacttcccggaacccccgcgcctcaccgcggttcctcggtggaactcggtagattctcgtggatctggataccgcgaacagcctaggcatatatgattcatgatacaatttactgaatgcaccttgaaaaaatgcttaattgcggccgtggccgtgacaattcataagtagatccctagacgccggtaacgctcagaagggaaaaaaaaattaaagtcaaatcagcccaacaccttcatcttcttcttcttcttcttctcatcaccaccaggtttgcgccccttctggaaatcccgccagctaccaatgcgctcttcgcgcgtctcctcccacttcttgtcattttcgcgcttgcgcttgcgtgcctcgagctcttcttcttccttgcgttgctcacgaccttcctcctgcaaacgtgccttgagctgtcgccggcgtcgcgcttcttcatccaatagcacgctgattgtcttcttccgccactcaaccttgaactcctcggttttaagctcgggggagtcgagtgtgtacttgtgttcacgaatcaacaggcggcgcgcatcggagatacattcgtccaggtattcgcgttgcttctcgtctagaagagcttcctgtgccttattgaggcgatcgaaggcatctggagcagcggggttcttggtcttgtcggggtggatcaggagggagatcttgcggtattggactttgatgtctttttctgtaacaccgggttggaggtccaggacggcgtagctgcagtgggttagtgtatgtaaaatatatagaggggcattattctattgtagatattaagattagacgtacgaatcgagcttgaatgccgagcgaatgcgatcgatctcaacatcctgtgtcgcgtgtcagtcgcaatctagatgtataccatgtggaggagggcatacctttttaaactcggaggcctctttctctagagcttcgagaaattcctggtctggctcgtcgtccgacatattgccttctgcggattcttttgaggtaggaatgttcttgcgctcaagagagtacgacctcaaaaaagataagacagcgggcttatcggtcgctgagtcagcgcccggggccccccccccggcccccccggcccacaacaaaaaaagaagnnnnnnnnnnnnnnnnnnnnnnnnnnnnnnnnnnnnnnnnnnnnnnnnnnnnnnnnnnnnnnnnnnnnnnnnnnnnnnnnnnnnnnnnnnnnnnnnnnnnnnnnnnnnnnnnnnnnnnnnnnnnnnnnnnnnnnnnnnnnnnnnnnnnnnnnnnnnnnnnnnnnnnnnnnnnnnnnnnnnnnnnnnnnnnnnnnnnnnnnnnnnnnnnnnnnnnnnnnnnnnnnnnnnnnnnnnncgcgggggccccgctgccggacctggcagcaacatacaagagtagcagtctccttgtctctctcattagcgaagactatcattgtcatgtacaaacatctagtcggccaaaaatcatattagatattccatccaagacacgattacaaataagctgaagacatcaaaatatctagtagttattagatatcagagctccttaccgctttccctaccgcctttgtttttcgctcccaagaagaaaaaaaagatgttttcaccgcccgctactttcaagattcaactcaaaccacatcatggcgccacgagcagttaaagggaagtcaaagcctcaccaggagacaggaagggtcttgaaacgaaagcgtggcgaggatagcttagctacactcatcaagcaggtcgaggacctcgacctcaaaacccccgtcaaaaacttctccgatctcccactctccgaaccaacagccaaaggcctcgcagcctctcattttaaaactcttaccgacattcaatcgcgtgctatcaatcatgcgttcaagggacgcgatatcctcggtgccgccaaaaccggtagcggaaagaccctcgcctttctagtgcccatcctcgagaatctttatcgcaagaagtggactgagttggatggtctcggtgcactcgttctctcgcctacgcgtgaactagcaatccagattttcgaggtgcttcgcaagatcgggcgataccataatttctccgctggattgattatcggcggaaagagtttgcgcgaggaacaagatcgtttaggacgcatgaacattttggtttgcacacccggccgcatgttgcagcatttggatcagacagctatgttcgagacgaataacctgcagatgctggtgctggacgaagccgatcgtatcatggatatgggtttccagaagactgtcgatgctatcctcgaccatctccccaaacagcgccagactatgcttttcagtgccacacagaccaagaaggtcggtgatttggctcgtttgagtctgcaggaacctgagtatgtctcggtccatgaatcagccgcctccgccactccctccactctccaacaacactacaccgttactccactcccgcagaagcttgacaccctttggagtttcattcgcagcaacctaaaatctaagacggtggtcttcttgtcatcaggcaagcaagttcgctacgtatacgaatcactaagacaattgcagcctggtatttccttgctccatttgcacgggcggcagaaacagggtggacgattggatattaccactaagttctctcaggctcaacacgctgtccttttcgctaccgatgttgttgctcgtggtctggatttccctgctgtcgattgggttatccaaatggactgccccgaagacgccgatacctatattcaccgtgtcggacggacggctcgttacgagcgtgttggtcgtgcggtgctcttcctagaccctagcgaggagaagggattcctcaagcagctcgagcacaggaaagttccgattgaaaatatcaatatcaaatcgaacaagcagcagagtatcaagaaccagctgcagaatatgtgtttcaaggatccagagctgaaatacctgggccagaaagccttcatctcctacgtcaagtcgatttacgtgcaaaaggacaaggagacctttaagatcaaggagcttccgttggaagagtatgcagccagtctgggtcttcccggtgctccgcgtattaagttcatcaagggtgacgatgcgaaggagcggaagaacgaatcttggcgaatggcacaaatgtccgatgatgactcagacgcaaagacgaaggataagaaggacgagaaggaagtgcggacacggtacgaccgtatgttcgagcgacgcaaccagggcgtgttggcggagcactactcgaagctcatcaacgacgatggcacgatggtggctaccgatgcccccaaggatgccgtagaaatcgacgacgaggccgacgaggatgccgacttcctctcggtcaagcgtcggttcgccgcaggcgatgcagaacttggcgggaagagcgattcttccgactcggaagattccgatgcggagccaaagatcaaagacaccaagggtgtcaagatggtgcacttggacggccaggacccactactcatcgactcgaagcgacgcgagaagctgctcaagtcgaagaagaagctcctcaagttcaaaggcaagggtacgaaattggtctacgacgacgacggcaatgcccacgaggtgtacgaaatggaagacgaggacatgttcaaggcccgcggcgacgccaacacccagcgcgagaagttcctcgaaggcgagacggagcgcacacgccaggccgatatcgaggacaaggaggttatgcgcgagaagcgacgcgagaagaaggagaagcgcaaggcgcgcgagcgtgccgaagccgaggccgaggccgcgatgtcggaggaggaagacggcctctcgcatctcccccatgtgcctttcgagatccccggttccgattcagactctggctccgagcgcgagccacggcccagcaagaagcagcgtgtctcttttgccgagccggacagcgacgacgacaagcccaagagcaagagccaggcttctgccaagcctatcgaaacgctgggagatctggaggctctggccagtggattgcttggttaatgtatatttcatggtttcatgtgtttgaggtctttgatggcgtatgttttccaaccaaaaaaatctctttcccggcgaggttcaaaagcatagtgaatatgaaagcgataatttccagatgtgtataaactatctcatacatgtctaaataagctctaaaagcctcctaaatgtagtatgtgtgcctgaactacctactccgtacctgtaaccctataaaatcttaccccaacaccaaatgtgggggcggacatttccttgacacatcaacgtcacatttcgtacgttaagccctgtgtactcatcgatggcttcaatcacgccatcgaggaagaaaagtcttgctatgtggtttttatcttcatcgtgttcatcttgatctcaactgttcccggtcaatgtgcctaatataacttagtgctaccataaacgccaaggggttgttgccaagtgtgggtcacgcgacttagggctgaatcgtcttagttcatacataccaacccggacaggtgagagatgatattgtttgacctttcttttcatgttttgtgctaagacaaagttagtggatacctccgtatccatattcattctatatcatggccgacatcgagaaatacccggcagcagagccctccaaggttccagacacaaaagccgatgatgtcccggcaaacccatttgtcaacgcagacaagctggctcgccgattgtctgggcgtcaggtgcagatgatcgcgattggcggtaccatcggcaccggtctattcctcggaacgggatcgtcactttctaagggcgggcctgcttcgactctcattgcatatgctatttgcggtggtattgtcttcatcactatgctgtgtctcggcgagatggcggcatttatgcctgttgctggatctttctgtacttatgctgggtgagtattagttacttgttttttcagccggatgattactaacttgctctatagtcgcttcgtggatgatgcgcttggattcgcattgacttggaattattggtttaatgatgctgtctctactgcatcggatatcattgctttacagcttttgttgcagtattggacggatcatttcccaggttgggcaattagtctaatcttcttggttgttgtcattttattgaacgtcctatctgtaaaggtttatggcgaggtatgtctagatgacttacactctattacccacctgatctaactgtccctatctaggttgaatactggttgagtttactcaaagtcatcactatcatcgtgagtgctatcccttacacaatacgcgcacgcccagctaattatctttctagatcttcattattctgggaattgctgtgaactgcggcggaaatacagaccacgaatatatcggcggcaagaactggcataaaggcgatgcacccttcgtcggtggaatcggtggctttgcatccgtatttgtcacagcctccttcgcatagtatgtgaactcattttatcattggttctgctcaatgagctccattctaacaatcgaacagcggcggcaccgaatccatcgccatcacagccggtgaaaccaaaagccccgcgaaaacaatgccaaaagtcgtccgcaacgtcttctggcgtatccttcttttctacctcctttcgatcctcatcgtcggcctaaatgtaccgtatgactacccaggcctctcagacggcgacacaaagaccagccctttcacaattgtcttccagcaagctggttccgctgtcgctggcagcttcatcaacgctgtcatcatgacttcggtcatctcagcggcgaaccatgccctcttcgccggatctcggcttctattcactctcgccgtcgatggatatgcgcccaaattcttcggtcatctcaatcgattccaagttccgtgggtggctgtcctcgcgacatctgttatcagcggtctctgcttcggggccagctatatcggcgctggaaagttgtggtcctggctgcagaatatcgtcggcgtatcaaaccagctctcgtggatttgtatcggtcttgcttctctgcggttccgctcggcgatccgggctcaggggcttgagcatctccttccctttaaaaattggacttatccgtatggtccgatctttgctgtcgggcttaatattgttctggttctggttcaggggtggaagtgcttcagtccgcatttcaagcaggtcgactttgtttcgtattatattgagattccgatcatgattgccatgttcctcgcttggaagctggtcaagcgaactagctttgttaggaagtctagtatggatttgatgacggaccgatatgatccttctcaggaggatgggtacggggatgggcctgagggtccggttacggagaagaagaagggtgcctggcgtaaagctcaacggtttgggcagtggttattcttttagtcttgcttttctttattctgtgaaaaatcgtatttcgtttcttccagttcttaggctttgtataacacctcttccactaagccgttcaagggtaagcttgtagtcgcttttgacacagcggtgtcgtaggctgtttcaatgcaatccacacacgacgcagctgctgctttgacttgagattctgtacagagtagttctgtactgcttgttggaacatagccgagaatcatgtaaatctaacctatactttattccatggtgctgcagttcatatcaccgatctatggatttttccaaagttggctcgcgccgtggccactctgaataggatgatatcgctcggcgtaggtgatatagtagacaagatcgtcggatatagtacggagcataacggagtataaactgaaccgttttaaccttacagccctaggctaacgagattttaagaggtttgaggctcgacgacccattctatatgatatgaattttaatggcggtttccgtaacgttgtagcttggttcctgtctctgtagaaagatggcaggattagctacacttggagaaagggggaaccctcaaaaatggaggacaagaaaaaaaagaaactccgatagggggaatcgaacccccggctgccgtgtgagagacggcgatgttagccactacaccatatcggatgaggactgcgaattactctcttaggtttagctttgaccttttgggtttagctttgaccttttgggtttagcgctctttgtccgtgtgcgttcccgtgcgtggttctataaagtcctccctttaaatttccggctctcctactcctcctttcttccccagtgggagcggaaaatatagttccaggaaatgaggagtgggccttgggtaacaagatgaagctgaagtaagtttacattgcttctatatctactattttgtacagagaacgtcctcggactctagttcactaatactcagggctatgttttgtacacagactcgctcgcggggttcagccggcattcgtgccggtgtatcagtcggaccgcaaaagtctccgtacggtcgggatccacacccgcgttttttcgcgaatacttatgttgtacaacagtctaggttgtatttactaaaattgaaaatgggagatatatatttgatggggggtgggtcgtacggaaacttttgcggtagaactgtatttagacttctctattgggccggggtgggcctaggcttccgcaagacccaaagcccaacccacgatgggccgggggtcgagccttcgggcccaactcggtcttcctgctgttaacagtgctcgcccagcctctagtcaccagcctctccaacatctccggtcgcatatacctactctacagttgcctcttgctgttcgcagctggcgcggctcttgtaggtgcagcgccgaacatatatctgctcattgccggccgggtcgttcaggggattggcggtggaggggtggatgtattgacggagattatcgtcgcgaggtaaatgggaacgaattgattgggttgtgatggtcctttttgtcgttgggtctaccgccacaatcgccccccttagctgggggggtgttctttatccatggagggcgtggcagacatacgtgccattaacaataggtccgctgctactaggagtccttgcattccatgaataccgcacggaaattcccatgtttcctcatcggatcctcgcaggcacaaccccggcgtgctgcatgatcgggtctctaatccatgggctgataacagccgctgttatctacattctccctctttattttcagggagttcaacaggaatcaccgataaaatccgcaataagtgcctttccattcagctttctggctgttcctagtggttcaatcgcggcgttcctggttactgcctgttcccagtacaactggatcatgtggacagggtggattaccatcagcctgggcgttggcagtatgtcactgttgggcttgcaatcctccagaagccttcaattcggcctccaggtcccgggaggaataggtgtgggcgtattgtacacaataatcgccattcccttgcaggcgacgatgcacgttgatgatgtcggtcttgcagtgggcactctggtcttcttcaggctgactggtcagattattggtctggcaatcagtgccgccatcttttctaatacctatactactcgtgcttcgcgctgggagaacctgccggcgatagcggagcagttcagagacggtagtgcggcagtctacgccatcggaaaattatcgtctcttgacggatatccgttagtcaaagataaaatacttgaaacttacgccgtcagcttacattacgtctggatagcattggcggtcttggcacctgttgggctgttgaccagtctcttcatcgggtgtaaaccattgaaaaatgatgagataggaaggcagggatttgccgatataaggcttcaggagcaaaacatctagcattgtataatagacaaatcattattctatctcaattggttggatgactatctatcccgcagcgttaagaccgcagttgacaggaagaatagacaccttcaacgtgtgatcactggcaaccaggatggatacaatcactcgctcaatataggtaaggtttctgagttggtccgcatactaccgccggccacagacttcccgtggtccccgtcggactcggaagccgtcgctctcggtcacacccacgtatacttatgccctccatttgccatagcccggagagccaattcatattcatatcaccgaccgtcaggaacgaccggacttatacttcgggtttaatgaggctcagctcacaaccgccatccctgtctccagctactggctgtctgcgacattctacgaaccgctccgactacttcgatcttttccccgagtatcgcctgcaaccgacggaagaataacgccgccgcaatgtcccctcgaaatctcatgtcatcaagacggtcctgaccctacatgtagtaccgcagtcgatccccacgttgcagcgagcttcaccacccgaggcaagtcgcttcgttagactaaggccgagcgaattatactctgtcggggcttacaagtgacgactcagttgaaataatacgccaagcattatcactagacccagttgtatttaacgacagccatcaagcatgggcaaatagtaagggaacgacccttcttgaaacactcaagactctatcacaggcagtcaaagatctccagaaaagggccgatacccaggagcaaggacacacaaaaacacctagaggatatacaaaagaacctcgaggatacacaaatagacctcgaagaggcacagaaagccctcatcaaatatgagcggacgtttgacgcatatacaattgaggtgcagtcaattgtgctggataaatgggctgggaagtctatcagtaatactaggaggtctcagcggaacgctgctgcccacggtggtagtatccttgccgattacgacgtgatcctccgggaggtggactagccaaactcgagggtagacctgtggaagccggcgtttgaatcccactatatccaaaatgcttacaatttgcttaaggccttccagtagactttaccggatagctactggcaaaagcgatgcgattgcagcctgcttttcgaggtcaagaagttaaagaaggctgatatacaggtagattggtaggctcttaggttagatctgatcagccttcttatcgaagacgaattaactagtggcctaagaaaccgcgagcgcgtcctttgatatataaaccatattgagaggagatttatcgaattagtataaagtatttactcgtctaaaaagtacccgccaagaacggccttactcagagtagttaaaaagggtatatagctagtaatttggcgtgtgtgtatagtaagtctcttttaaagaaaaatctattcttgtcttggatatatatatgccagaaacaaccggacactgttatcatttctatcaccacctggggagaagttgacgtatccacagcaaaagacgtttttatcgggaatggaactgtactgctttctgtcatttgtctgcgcttgttctgtagacaggctgcgacggaatactcatgcaatgactcgcgtacattaaactcacagaatcgagaacacgttgcaagtctgccctgctcttgcacgcataaaacagcatcacttcccttgcgccatgaattatgaggctcataaaacttcccctcgtatttttgtaggacatccgttcgcatgtactatatgatcggaatctgcgcaaagttgtccacacatctatagaacagctatttgtggtactttcctggcacacctggaggaaaaggcaactgtaaatgtctcagtctctcttattattcccattaccagaccagcaaaattttgcctcctcaaattggcagttctctcactatcacaacttaacaccgtcttattatccaaagcccttcaaatgaaagccaatgtgttgtcccttcatgaaatgacagcgatggccttgagaattttctaacgcgctgcccttaacaacatcgccagtggtgttatgggtcaagacccgtatgctctccatagatacgaatttcgattttttggcgaaggcagtaagatgcccactgattgactgagcaaagatggttgtacttctccggtgttggagagaaaagaagatacaagaactcccaatcggagacatttaagcgacgagtcctcacatacaatcaattttagctcgtgattggttgcgtcgcggttcatacgcacagtccaatcagaaatggaattatcagaaagaccagacccacttacgcgactgattgatgtatagaaccacgtgagtggacggcaacttcacttgagaattttttttttcattcaatctcttcacaggtctaaagaagtgaaagaatgcgccgatataacataccgatgagtcacagctcaaatgagggcagggttgagcttgaggctgctcttgagaaccctgcggatggcgacgtcaacttggcctttccagaaggtggccgagacgcataggtctgcttgctaggatcatgtctcatgatattcccctcatttggctttcagactgcaggtgaggatggaccatactctttttgacctgtcgaggacacgatgacttacactattgatagttggatccgtccaggattatatcagcacccaccagttggctgaatatggagagagagatgtcggctggatcactgcagtgcttgtattcctgaccttgtttctcggagttcaagctgggccgctctttgatcgatatgggcccagagtcttgttgatcagtggatcacttgggagtttcgcttcctacatactgctcgcagaatgcaagaagtattggcactttatgctctgccttggtcttcttggtggcatatctgcagcaattgttacgacagtctccattgcagttctcagtcactggtttagccgaagacgcgccctcgcttccggaatttgtatgggaggatcatctgcgggtggtgcgatcatccccttgatgttacgaactttgtttggaaaatatgggtgcatatgggtcatacggaatgtagcctttatggctttgggatgctacatggtgggagtgctactcgttagaggacgcctaccccctggcagcaagaacagagtgacgatcgaccttgcagctttcaagtcaccccgtctatgttttcttgctgtggcagtcttttgtttcgagttcatcatttttggatgtgctgcgcttcttccatcctatgtccgttacagccggttctccgtggatgtgcaattttattccctcactgtcttgaatagcatgagccttctcgggagagtcctccctggctttgctgctgatttatttgggcgatttaacattttattatccttggttgtgataaccatcgtgataatggcgggtgtttggctaccatatgtaaacttcctgctagccctagcgttcgagtctataccttggctttccatttccagttccagtccaaaagagcccatcgggacaagatgacgctgagaagtccaacgagcataatggcaaagtagaacccaatgagaacctgtgaaatgaagttaggactcggtgtgagggacggctcataggtgaaaaatacgtttcacgctgtggttgggaacagagtaactcggctagtcatgcgtagggcgcgcgggttggcccacccatcattaattggttgaggttgcctcacttggatacgcttatcccgccagcgctttctattggtcaaaccttgataccaatccagccaatcagaaaagggggaatttcgtatctcactattgaatcccggacagagaaaggtacagatgcaggaaatatgaaatctatacattcgcatatgcagacgttcttaactagagagttgaccggcttcttacattcttctgcatcatatgtgagtaaagcttcatgctgacgataaaattacctgtaacatcctgacccgggcccgcctccattggatgacaggctgatcacattattaacgtctggtcctcctgggcttcaccaacaaaccgatggcattccctatgtgccctccactaaatgtaattcacataatcgaaatcttatgatgcctggccagatggctcttatatccaggaagagacatccaaacactcaaatatccagcaatatcacattggcgacccgggctttcgaaaatgtcctgaaggtaatgacctttaaactaaacctgaagtatagcttctgttgtctgccatgaagatagctccccactgtggagtatgtcgtagaagcttatgttttgaaggagctaggctgggcgctattctggcgttacctcgtgaccttactaagggacggcggcttcaaaagtggggttctctttattactttgctctttggcccgtcgaccttgccagtaggggtacgttttggtcacgacttacggctagaaaagaagattccagatatctattaaagatataagtccctgacgtagatatatattcgcaagaagacattagagctcaagcaaaaataagtttgttttcaaaactcgcgaatcatgcggtggactgccatctcctttctccattggaggagattctggatccgtccggggtcaaagcgcggggtagtgcccgtccggggtaaaactcgccgaacccatagcccgcggatgagatgacaccgagaggtgtcctactctgacattcgtcgagttctttgaagatcgatcatatttatcttgcattctacgtccaatgctccctagtgagcatgatgccctacagacatagagagatcaagcatcatgagcatccaacttcatgttcggaggccagcggtcgaagacactctgaatgggtcacgtttgctgatcatttgcccattctcaggttaaataactagcgcttacgattaacctctcccggctcctcggttaaattccaaggtttattcgttcattatgataggctcgacatgaccgggctaccctgacagggaatcaggagggtcggactttagagtggacaacaagaaaaaaacctgggacgggacacagacatgactcgcattcactgagcgagggaggattctggattctcccctaagatccaaagaaggatattctccggcgaatggaacgccacatctagacgtataccaccacatttcagcataccccgcaaagtaaccaggatatttcctccccgctattacctatcaggactagtccatgtccgatcacttcgcttgacaagaacccggcataatcaagtgacgctgctaccgtagtgcccggggaaatgaccctcatgcaaggagttgccgggttgaggtggtcaatgtccggagcaagcttcacccaattgagctaagatcgggaccatcatcacgagcgtgtcgccgcaggtataaagatctgagaccccctgtcatgcctgcccctctttcattcacccgtttctctcggaaatcgtcaacatgaatagcgacatcacagagaagcagacctcagcggaggagatcgagggacagcccacatccatgggtggacttgtctacgatgtcggtgagaaggcccactacgacagagcgggcgccatcgaggccgaggtgcttgaacatagtatgactgtgcttcaggctgtcaaggcctatcccgctgccagctggtgggcattcgtgatgtcatgcaccattgtaagttcctgctcgagataggcagatcatttccgtaacgttgaaatagatcatggaatcatactgtgtcttcttgatgggacagtttatagcgacagctcaattcgccgaggattttggtgtatacagcgaaaaaacaaacgagtggattatcgaagcttcatggcagtcagcattccagtgtagcgggccaatcggtgccttcatcggtgtgttcatggcaggtcccattaccagttggattggatatcgatgggccaccattggtggtctcatgttcttgaacggcttcatcttcatcttcttcttcgccaacagccagggtatgtttttcgcgtcccagatcctggaaggcatcccgtggggcatttttatcgccaatgcacccgcctactgtgccgaaattgtgccaatgagattgagagctccagcgacacagatgttgcaaatgttctgggcggttgggtcgatcatagtcggcggtatcacttaccactaccaatccaagaatgactcgtcagcgtacaggttcgtccgctcccatagatgccatagaggagcactgtactaacactgatcccagagttcccattgcaatccagtggatttttcctactcccctcgctatcctactcttcctcgcacctgaatcaccctggtggctcgtacgaaagggccgtctggctgaggcagagaaggccatcaaacgccttggacgcgcgagtgcaaatgataatcccgctgacgcagtcgcaatgatgcgtcgcacgattgaactcgagaagactgagaagaagcccagtcttattgaactgtggaaaggtaccgatcgctaccgcacattgatagtgtgcggtgtatacgcatctcagaatctgacaggcaatctgattgccaaccaagcggtttactttttcaaacgtgagtccagccatttcctgcagcttcatggcatactaacaccagctcagaggccggcatggtagacaacaccgcatttgcacttggtctcatcacttctgccctccagtggatcatggtcatgctctcttggatcctcactacatacctcggccgacgcaccatctatgtttatggtcaattcatcaactgcgcattcttagtcgcgctcggtattgcggcttcagttggcactagtaacgcggctagcaatgcgcaagcgtcgcttggcttgatcgtctctgtcctgttctgtttgggacccgcgcctgcctcatgggttatcatcggggagacatcttccgttcgtcttagaccactgacaaccggtgttggacgaggtgcatactacttggtcaatattccttgcatcttccttgccagctacatgctcaacactgataagtggaatctgggcggcaagagcggctacatctgggctggtaccgcctttttctgcactgtcatgtcttggatttgggttccagagatgaagcacagatccttccgtgagattgacattctgttccggcgccatgttccggctcgcaaatggaagcagacggtcatcgatatccgcgatgatgagtagatggaaattgcggtttggaggttgctttagggttagcgatcaatggaatattcgacttaaaggatgattgatcgtcttcgaggccatcgagtcttaattatatacctgggggactagtgctcccaccctgttacgattcacgtcataccaccccctttcctatttgggaatggttaatgcctgatacaccgccttagtgtttccctagtaagacggtagatacctacaatttgtatgtaaacactaacaaaattaagtcacttttaccacatcaactacgtcgtcaactacttcaaaaactacttcaaaaactacttcaaaaactacttcaaaaattgctttatcatcatcaagggattaaggcatgtagttatgagacaaaatacacgttttttcctgatcaaaatgtaggtttttttgactcagtctcgcagaattaaattgatgccttatgcgtaaggcggaatcaggcggaatcgaggcggaatcaaggcggaatcaagcggaatcaggcggaataatgcagaggggggtccctataagttataacaatccccttcgtatattatcggaccttgcaacccttcatgtatgctattgatcaaatctatacgcctcatcaggtgtgactcactatccgcgatagatcgctatcatgcttcatgtttgctggcttgcttgctatttgcattacttcatccgattgttattgtttgccacaggctaagcgagatgttcagaggttttcaatatttgcaaagagacagctatatcaacaagctgcttcccacgtttgcaacttgcttcttctttctctccatcttggttattctgaattcttctctcttgcaagtatgttacatctaatcctctcatgtgatcaactgactgaggtaccggcgtggcgttggcacggtatctgtcgaggactcgagggcatagcgcctagtactatgttccgaagtgccgtctcctcgtcgaggtcgggttcaagattgggtagagccacggacctggaagtcgagtacgagactgtacccaatcttgaacccgaccttgccgaggagataatactagtcgctattcccccgcctgagcattctccagccccgacagataccgtgccaacgccacgccggcaccttgccctacctactatccgggccactcccatttcaggagtaggcacgacatttgatgcgccatgagtcgggccgtttcgctcgacaccctcgcttatatctctgccgcagaacttcatgccgccatttccagctttgaaatcaaagatgtcgagaaggcgttgaaacttcgtctagaccaaagagacaaagaaacaaagagcttgagcaggttactcctatttctcccacagctcctaggtatggtgttctgaagatcaaggtattatagaactaacatgttgcagtggagtatctgaagctgattgatgaagcattgaattgatcgccctccacggaagccagtgtagggtggaccatcgatgccttgctactcaatgcccattcaatcgtagcagagcgcacatcctccgcacgctctatcaacgtccagccagtgcgctcgtatacatatgggccggtgcgatcgaagggaagaccgtgcgacaatccagcctatgtacgacggcaaatgacgaccacaatccacgaacgtacgggttgactgtacatgcggacagatttggttatgacttacgccgagaacggtattcacttcacacccgttgccagaatatttctgggttccacccgaggagtggtgataaatctaaacaaatcatggaccgcccagacaagatcgcagaagatatttgggagttaaaagagaccgcgccgtacatgagaatgacatcggttggcctacacgactgactccttctatcaaacgactcacctagagccggcaccaagccctgatctgttcgattgattgcgcttgcgtctacggctcctggttgctcaaatagcttgctaatataacttggttccgaattttcttgaaactatgagccgctatctcgtttaagtaaaaaagtggcagatcatggttgggtcatttgaaagaaccagcctaagagtctgataaaatccgagagcggctatagtaactcccatcaccggcgttgcagctgaggtagctcctttcaacttgaagttgcgagttgtattaagggcaaggaaaatagaatagttgactaagtctacagcatgaattatggagacattgtttctcgctttctttcggatgtttgaccctagttataacccgcaattttagtaatagaatgcaagcgccggtgacatgtccagagtaggtcagggacaatctgagcatggccacatcgtttagtatactttcgttccgccgacggaattcgatatacgtcattcccgcgtacgccgtatcggctttgcaatgacgtgagacatgaggctaatcgctttgtcctcgtccccatggttctagagagtcttgattttccgacgtttctcacctccgtcctctggtgaggcatttttattattcactcaggcacccgagccccgccacttccgtcacctgggcatgcttggcatgcttggcgcgctagtcagcgccctcaggcaaacgacgctagtttcactcggtttacggagaactccggaccccgtttctctttgctcttatgtacctacgagtactacaaaaaccaggcattttgactctttctccgttgtactgacttgcccctgctcaaattctaattggtcgcgtgactatcacatgtctaccctatagacaagcgcgctacgcagcaggtcctcaacatgtagcttctcagctgctgcctcgtctgacccttgaccagaagttacttgttcatgatgccaacacccgcaaggtcccacggcgggcgagtcgtgaccagcgcggctttcattatccgaaaattggaacttattataaatgtaccactgctgaacgcccttggggttgcagtcaaaggcttcgatatgttacagtttttttattcagtacaccgagccaccgtctggtctacattttttattttgtagtccatatcgaatgcaaaagaaacaaagccgagcttgtaacggaccacacaatttggaaagtaaggcgagtactgatatttacgctaacatatgttgtggctgtacggcgtaagcttggcttgcttctaataccgcattgcttgtcaaaggttaaccattttctatcaataactgtaatctgatgacaactaaatcagtccgtgttaccggaaagccctcagaccctcagatggtagtattcagctgtccacggaaattgcatccaaccatgccatgccactatcagaactagtacgcgagatgaaaaggggccggattggtgatcttgcagtccttggcgtggggagaatactgaagccgagacttaagatttttaagcaaaactaaagagttcttacactagttataaaacacggatatatcagccggttggtaacggattggctaggggataacccccagaaacccagaatccttgactaactattccccggaaatcatctgttcaacacagatccataaacccgatcacaacaagccacccacgcaacaccttacggagatgccgagtcggtcccgatgccacttacgacccttctacagcctaatcggaaagccgggtttgacaaaagcatttagccgagattgcagcggtccgtgtgccatgtgccgcggcgcaacggatctggatataattggtcgggaccctgatacataactgggcgagccttgtctagcatacattaaagcacttggcgaaagaagaatttacgtcatgatggggcgaaaagcttgcgacgtcatgttgggtggaacggccttggcgggatcaggtacacggcaatagtaggatgcaaacatgcatagcatggagaacgtgcgaggcagaaccatttgaaattacctgggtgcatttcgccatggtagaaagcgatgaaaaaggcatagcgctattgatgttactgcattagacacaggaatgggccccgcggcatgccgttttcaaaattagtcatccgtgcccagactcgtggacccccgccaagtgcgccaagtgcccccaccaagtgtccccgccaagtgccaagcggaaagattcccccgcgtctctccgcatcgggaacgcgccctcgctggactttcccgtttcggatcggccaaggacgtagtataagtccgattttcaatttaccatatccgttgcagcccccgtggagaagtttgctataagactcccgattccgccgtctcaatatcttttctttccttaccactttttccccaacttttttttatctccgcgcaaacggacggcccttgatttgtctgtaccgccaatatgtggacaaccaccagtggcctgagtggtcgatcgctccgggtgagcatcaccttcgtcgctgtcgtgggtttctcgctcttcggatacaaccagggcatgatggccggtctcctcaacggcgacgagtttgtcaagtcgttcccaatcctcgaaaaacccgacaatgcaactccttccgaaagcttctacgtcgaagtcatccgcggtgctgtcacatcctgctatgagattggatgcttcttcggcgcgttgttctccatgttcttcggtgagagcttcggccgtacccgtgtgatctgtatgggcggcagtgtcctcatcatcggtgcattgataacaacagtctgctttactggtcattgggaggtcggtcagttcgtcatcggccgtgttgtgtcaggtattggaaatggcatgaacacggccacgatcccggtctggcagtcagaatgctccggcgcacacaaccgcggtttccttgtctgcttcgagggtgcaatgattgctggtggtacctttatcgcttactgggtggtcttcggtctttcgcacgccggagacagcgtccagtggcgattccccgtcgcactccagatcttctttgctctggtcgtggttatcggcgccgctatgctcccggattctccgtcgtggtttgtgaacagagggcttgacaacgaggcctgtgtggttcttggcaagcttaagggctcctctccagattccgatttggtgctccacgatttcaatttcctcaaggcggacgtagaatcatcgaaagccgctcaatccggctggaagacagtctttaccttcggcaagacccaggaactccaacgtcttcttattggctgttccggtcaattcttccagcagttcaccggctgcaacgctgctatctactattcaacgctacttttccaagagaatttgggtatggaaaaatatctgtctctaatcatgggcggtgtttttgcttccgtttatgcccttgcgaccatcccctccttctttatgattgaaagagtcggccgtcgtaacctatacttgattggtttcctaggtcagggactcagtttcgttatcacgtttgcttgcttgatcgagcaaaacgagtcgaacgccaagggtgctgccgttggtatcttccttttcatcactttcttcgcatttactatccttcccctgccttggatctaccctccggaaatcaaccccctccgtacccgtactatcggcgcgtcggcctcaacctgcaccaactggatttgcaactttgccgtcgtcatgttcacgccccttttcgctgctcagagcccttggggtgtctatctgttcttcgcactgttcaacttcatcggtctgatcttcggcttcttcttctacgttgaaactgccggtcgtgagcttgaggaggtcgatattatctacgccagagcccatgtagaaggaaagatgccgtggcgggtcgccaatgccatgcccaaactcaacttcgaagagatcgctcaacaatctcgtgagctgggcttgagttccatcgatcatactagagatgagaagagcgagcttggtctcagcagcagtgacaatagacaggaggttgaggaagtcccggagaagcactaattattttgggtgaatgcaatgacgtgccaatgtgtggttgatggtgataatgtttgtgacatggttttttagttcaatttccttttggtctatctcttacgttcggtcggtccccttgacgtcttttgctgtggatatatcaacttctgcccaggtgatgatagaactgattgcagtgcccaggtgtttctggcatgtatatatatccaagacaagaatagattcttttcataattctatctattattctacttcttctacacaccaaggctgatcttcatttccacctgaataggtgagaacccgggcagtacagcaaatcgagttattttattacagtaattcgataaatctcctcttaatatggtccatatatgaaaggacgcgctctcaggccaggcaactagtgaattcgtcttcgacaagaaggctgaccagatctagcccaagaccctgccaattcacctctgttttggtcttcttgaacttcttgacctcgaaaagcaggctgcaatcgcatcgcttttgtcagtacctatccggtaaagtctattggaaggcctcgagcaaattgcgagcattttagatctcgatcgcggtatattcagccggacatactgtgtcaattatcagcatcgcgagatctagtggaaagttacggaatccggtgtgtacgtgtactttcctccttatctgatttcgctggatggcctctgcaagcttcagcacagacagtggattctggcagatttcgcgcagattacgaagcgctctttttatctcagaatcagattggccgggggaatctgaatctgatggcatttcagaccatcgggtgcgaaagtcttgcgtgtctcgcaatctatctttttgccaaaagtgttgcgccgcctgtacaaagatgtcgaggtttgcctcgatgcgcgtaatgcctccttcgatcaactggccgaatagcgctcaacaatgggcatggaccagatacccaggccgttcttctggtagctaataagggtccggtccttctggactgactcgtgctgcgccaagctctcccagtagattcgcagtatactttggcatgaagatatcatccaattgactccatattcgtgcttggtttgggctgcgcggaaaattgtgaactccccaacctccatcgaagacggtgatgcctgtgaggcgatgccgttgatccgcttctactagaactaggctgattcagtcaaatgatcatgccaagtttctctgggatatactcacttccgcggtagagagctttccatatcgggggatgcttatggaaaactgtcttttcgacctcagcggacgggacgagtatatgtttcttcgcacgatcgtcatatgtcttccaccactcttgctcatcctttatttcgcgacgtgacggtccttccccattaatccagacctcgttgatagaagaagcacagggtagacatgatggtaggtgggaccaccattttctgccgaagttccaagtataacttgggtccttgcgctggcccatcccgtcaaaaatcattgctgctgagttttcaaaatgtcagtatagtatttattgcgagctgctcttttgaatagcaagaaaattcacactagaaataacacaagtggtataatagtgggcgctggatataagactggtcgcgtgggggctgctgacccacggcaccggtctacaggttctgaactttgataagcaccaccggcatgtgtgcattcaccacatcctccgtcttccaaatatacaaataatagtataacccatgccaatcatagctaaagtagaatctaagagaaactgaggagatggtttccagtcacgagacgagagtttatggcggaggatatctcgcttcagcatattagcggagtattttgacctccagcatttagagataacattctggtaaagaacatcctgaagactcggaaattcttgggccggcatatcttttctcaatttcatcgtccctaacgaatgaagcaccctagcgctggtctcaacattcgctgtcacctgcataatcgttttaacagccgccaaaactgtcgcgacaaatgtaaaccctcgcattacggtcgctgaactctccattattctctggtttaccttatgaatgtcttcccttcctccatctatgcacccccagtactaacaaacaaccaggaggctctatccacctcatcctcgaaggctactatgccctaaacttcgccacccttccgggctcccagcaactcctcgcgcaactatggaaagaatactccatgtctgattcgcggtatctcacttcgcacgccttcgtcatgtccatggagtccattaccgcctggttctggggcccgttatcattcgtctttgcgtctttcattgtcacggataatccattccggcacccgctgcagattaacatctccaatggacagctgtacggggatgtactgtactactggacctgtgcgtttgactttctggtctacggggttgagtactctaggcccgagggatattacttctatgagtattttgtgctgttgaacgggttttggattgttattccgatttgtaagtaggtttttttcattctgtcgtttcttcagagttggtcagtgaactgttctaatgtttttagtgctcattgcccatagtgtgagagcttgtgggagggcttttgcggaggccaagagggtgagcacggtcggaatgaatgggaatgcgaagataacgtcttgaagaagtttgttcaacgccatatcggaactggttttatatacctaggcagtcccgatgctatttaaacgatgacaaaattacagttggtgagtgctgtggcattgggtctcaattcgccttttcggcaacggtcgtttagcaccgtcctacgatccctacgtaacagcctagggatagctaaagcaggaatgtttataacacgacaacatacaattagaagcaatgatctgaaagctatatttcaaagaacgtatcggaagtttgggttctgttaactggttagtgaaaagatcgcagaaaggaacaatgatatgcagtcactaacctcgaaatcagttagatctgccccagcactctggtcgacagatgactcgatatggcccacagcagaagcggcagcatctcgcagcttgtttctgcgagccagcacaaaccgcagcaaaacggccaaagcagcttgtgcagacgagcatgccaggatgagcttgactccggtctggtatacgggcgcctcctttgccagaaacgcgtggggtccaatgatattgccagcgcagtacgcaaagaaaacgaaggcaatactggttgtacgttttgtataaccacccaggtttgtcgccggcatctgcaaagccagtaccaaagagcagacgtaggcaccgatgatataataaccacacaacacgccgaccttgtatgtctgatggtccagcttccataggagactggcgccgatgacagtcggcatcaagtaaatgaacatgatgacagttcggaagtttttgattcgagatgcgagatatgttcctcctaggacgtaaaagatctggaatcctccaaagggaatacccagcgcgatagcagtggccgagtcattggtcaaccccctgataattagtttgccgaagctcgcgatcccaccatttacgacctcgttcagaagagtgaagaagaacaagatccaaacttgtggatcaatgaaagcttcacggatctgatgccatttgatctggtgattgatgataccggtctggccgagtcgaccgcggccaatgaggagggccttttcgtccaggctgaaacgcttcgatgagataacgtcatccgggaggaagaggagcatcacgactccccagacgagggtaatgccgcccagaatgaggtaaatcgctctccatacagcaatggtgtcgatttgtccaattccatatgtgagaattccacctaccatagctcccagtccgttgcagctgtagaagacaccggcacggaacggttgctgagcacgtgtgtaccacattccgatcatcatcataaagcatggggtgatgggggcttcgaagactcccagaagaaagcggcagatagccattccagtgaaggaggagcaggcggcagtaatcatgagcatggctccccaggcaataatgttcccagagacgactttggcaagctttgtcttctgtgccaggatattccatgggtattcggcgacgagatatgcaaaataaaagatactggcgagccagctgtattggttgcttgacatatgtgtcgaagagagaaggtcgaatacggcagagtaggcgagtgctgatttgtcgatatattgaagcatatacgttccagaaagtaaaggtaacaaaacaagatctactttgcggaccaatgccttgttgcgtggctcgtcatccaggagtgcctggatggcctcttggttgaagccatgttggcggaggaagacctctccttcatcgagatccgttatagtgccaatttgcacatccttctcgtcgatcgtatcgtccacgggtgatttcttgtcgatctccatgctcgccattcaatgagtaatgagtaatagtaaacaaaaagatatcagggagccatatatatccctcgaatccttcggtcataattttccgttatctttggggttttcccccgcacggtataacctagctactttcgaccggggagatagcgatccccacgatgctatacgtatttaccttcggctccaccaagatagcccccacacggtatgacttcggcgctacttttgaatcccggagagatagcgaccacgcccgcggtgctatatcttgctcccgaccccagctcttatctctcgggatttctcttcgttgatttaccactgaaccgtgatacaatcatgactgctgatgccaagtccccctccgtcaccttggcgcaaggccacgtaataggaacccaactcaaagacactttcccccaacccgtcgacgccttcttgggagtcccgtatgccctccctcctgtaggcgatcgacgcttcagaccagcaatcaaagttccgagctcatcagataccattgatgcgtccaagtatggccccgcggctcctggaaaggcacttctctccggaggaccgaagctcgtacagagtgaagactgcttgacggcgaacatctttcgaccggctggcagcaatgatgggcgcaagctccctgtcgcggtctatatccacggcggtgctttcaatcgaggagcggcaactatgcacaatactgcgtccatggtggcgtggtcggaacaccccttcgttgccgtgagctttggttatcgcattggagctcttggattcctgccttcgagtttgtcgcagaaggagggattgctgaatctcggattgcgtgatcagctgcttttattgcaatgggtccaagagaacatcgccaattttggcggtgatcctgccaacgtcactttgtttggtctttctgcgggcgcgcattcagtgaatctcccaattgctgatttctgtaatatttattctgaccaaaatctagattggccaccacctccttaattacgacgagcacaaatcaccattgttccatcgtgtcattatcgagtctggagcaccaacttcccgtgctgttcgcccatataacgccaaggtccacgaggaccagtttacagacttcctccaagaagtcggttgcccacccggtctagccgatgctgaaatctttccattcctacgttcactccccagcctgactgtaacaaatgctcaaacggctgttttcgacaagtacaacccttccctgcggtgggcattccagcccgtgattgacggggacattatccctcgcaagcccctcgaggcatgggagtcaaaagtctggaataaagtacccataatgaccggattcaacagcaacgagggaacaatgtacgtcgacaagaaaatgtcggacgcctcccagttccgcgagttctggcacagtcttctgcccgagctctcgccgtctgatctcgacacaatcgagaagctctatcctgaccccgccgttgatcccacatcaccctatattgaagacagacagggcgagggtctcggacctcaatataaacggattgaagccgcctacggacactatgcgtatgtggcaccggtccgccagacagcacaatttgcgtcatcggaaggtgttcccgtttacctttatcactgggcgctacctaggacggtcgtcggtcgagcaaaccatgccgataatatgtactatgagacctttaacagtgctatcacgggaatttcagaatcccagaaagagctgtctggcacacttcatgcctacttgactagtttcattacaaccggtgatcctaacgccgtgtctggtcgatatggacaaagaccggagtggaagcccttccagccggcggatacacaagttttgatctttggagaggggaatgaggagttgatcggaggtaatgttgctcctcctgcgaaatgtgtcgcagatgattgggcaagagaacagacagaattttggtggtcgaaggttccgatttcccagcttggttgatggatagaacgaacagaatgaattcatgctttctcgtgcgtctttttacatacctgtaaatgtctgtttagaatgaccagccgcgaactatgacgtcgttcatatattttcttctgaactagaaagtctatgaaaactcatgtgcaatattactatacaaaatgcttgtacttcaattcttgggatatttacagcctaattccaaataaaaaaaaggcactaaatggcttatgctggcacgcgtgggccaacacttctccagaactcacagcgctcaccacggccaccttcccacttcgacgcatctgccaggctgaactcattcgtgacgccaggtccttcccgaatccagtaagagaggttatcagtaactttctcgtagaccgttgttccacccgtggtgttcaaattcatcaacacgggagagttgctattccaccttggccaggagatatctccgttcgcacactcaggtacggtagaattgtctgcaccaccctttgcatcgacgatggatattatcggggtgtcattgatgatgaaattgccccaaatcttctggaatgcatggatcaaaccgggagtgggcgtagtcgccccaacagagaagtatgcggacagatctgccccatggtacccaggggtcacagagtattgatatttccagctctccgtggtattttttccagcaaaagcatccgcaagccagtatgaggggcagtcgaaggctgattcggcgtatatgtcgaagactgtctgctgaagaccggttgccatttccgattggttcagagcattctggccatggtcgcctagtgtatcgtatcggggagcagtgtcttggggagagctgtttcggaaaccgtagatatccagcaggcgggaatagtcactgcgggagaacaaagggaaagtagacttgacatagctcaggaagctagcagtggtgttcacaaatggcgggctaagcgggacaccttcattggcattgttctggaggacttagcataaacaaacctacgtgttggtatgatcaatggacttaccccagatagaacgcgcttgccgctcactttcttcgtgtataattgcttggatggaagctcctggatgaaatcgccatctaccacaggcaggaaggcccaggtaccccatgctcctgaaatggagacatttgcactggcgtattgcaaagtatcggtgtcagcattgacaaggcagtcgaatacggctgcctcggatacattgccaccattgtaacaccctgctcgtgcggcaaaatcctgatagtgacctgtcggcactttaccatcgtactggtgcaagtcagtggtataagggctggcggcaataacctatgcaagttagccagactgtctcagatttcatagcgctgtaactttacattattgaataagtggtcctcgcgaccaccataagcaattgattgtagcagcaccgagcctgctccagaagactcgccagcgatcgtgacgcgggaggcattaccgccgaacttttcgatattctcctggacccattcgagggcgaaacgcatatcaagcaggcctgcattggccttgccatacttgtgcactccttccgaggacaaaaagccaaaggcacccagtctgtactgaatcatgactgcaataaacccgttctcgtttgtggcgatccattcactggggtcgtattcggccccgaaaagcccatatccaccaccatctatgaaggcttagaatatgttctttcggtcaaatcttttttattttgacttgtgcgtagacttacgaatccaaaggagaacagggagatctttggctccgggcggagcatacaaattcaagaacaaacagtcctcattgcccagggctgaaccgaagccatacaattctggaagctgtgcagcaccggactgtgggcagagtggaggctgttcagtggcagattgaatggaagtcttgttcactgcaggggactgaggcggttgccatcgcagctttccaacaggaggggctgcatatcgaatccttcagacaataagtaaatataaaaaaacacgctcgttaagcctaatacggtatgttcttaccccttgaagacattgaggtcgtaggtgttgtcatagtaaccctggtaggtggcgtagtctaaatcaaccactgggctcgaggtttgaaccggagtagccaaaccagccggggcagtggtgagagccaaaaaaacaaggctgcttattccggcagcgaaacccatatctgaatctccaccgttggaatcggatgattggagaggaaaagagacgggacgggtggtatttttatgagacgatagtgattggtgaatacgagcttcttatgtacacctgcaggactgacagccctaagcgacctcgggagtccacgggccatgtaacattcctgagagcgagcggatcagcccgaatgtcccgttgtttattgactccactatttaaaggggtatataatatactatgcgtgtcctgaatggttgtgttgttagtgtcgagcttagcatatcatccaggccgctactaagcgattgcaaacactctgattgctccatccgtatccacaagcaatatacaatgttcaaatgtgcagaacacgggagcagcaatggggcaatgggggccaaaataaggagtaacccctaagtaatagacgtaaactaatatatcgctcaacggtcggagtttttttagaatccttcactctccccgtaatggcggaggaagtcgatttgagcgcgtcgcgggtcaccaccgtgactatatgctattcggttcccattccattcatgattttgtttactgggctccggcttttcgtggtactgcgaccttcatccaaagatccgttgagctttgatgattatatgattactttttccacggtctgaaccaacttttccttccggatcttgctgttcttgggatatccaattttctaatactgctgtaggcaatatccattggactctgtataagtggcttggtgtatggtaggttcttatgccaagatatatattggattcttgcaagggtaaggctgacccagattgaactttattatgtataggtccaccctacggctttgggagacatcaagcgacgctcagtacccatgaagtccaaggtttcttgcgggtgatttcaacagattcattatatcaatttacatactgaacattccgaatagggcgactatatcttcagccatttctacgattgggccattgcaagcattaagctttcaattcttgggctttactatcgcatttttagcacggtcgtttttcggcgagttatcattggcaccgcagtctttattttttgctggctcgcagcgatggagatcggcctagggctacagtgtatccccattgagagaagttgggattcggatgttaaggggacctgtataaatctggtggccttctcctacttcaccaacatcacgaacctggtcagcgacatatgggtctttcttcttcccctaccgattatcttcggactgcacgttaatcgaaagcgaaaattggagatcgctggtgtttttgccattggtctattgtaagttatgctctacgtcgactggaattcttctgacctgtttagcacctgcggcgttactcttgctcgcttaaccgttgtggtctcacaagggtcgtcggacttcacttgtacgtcaaaaaatatccgattcagtatccacagcgctaataacaggattaggggctggtgttccgctcggaatcctgtctatatacgaagtactttgtggaatcgcctgcgcgaatctcccctttctttacaaactagcaatcgggcctttcaagaagtctgcctcttaccactcacgtatcggagagtcagagtccggagcagagtatagagctaggcaaaatagctcacggaggcatacaaaaacactgagtatgcacagtgaagggaggatgctctcacggaatgggaatgattcgacaacattgattgagacacgatccaatcaaaatcccgagatagaactctcaatagtggaacgatcgtattccatgtctcgatcagatagccaagaaatattacggaaataaccatcaattgataaatgcacccaaaatgttggaaacaggcgaaatttattttagattcgatgagaggggaaaaaagtataaaaaaagatattcgacagcacagggatttgaaccctggatctcgaaagaactagatttctcaaattaggattcaagtctagcgccttaaccactcggccatactgtcggaacttattgtgaaaacccgtccgacttgttcctttaaccaaacatgtgcctactagtattttgaagtaatattttccgtattattttcagtattttatccaagtcaatggtattttctcaacatatcaccttcatctcggtgctttccaataagatcgaatcgttatttgtccataaaaaatgttctttctgattcttacattgatctccttttcttatttacaaatattaacctcgttcaactttgccaaaattggcttttttaagctttcttgtcatccatggatagagtgtgggtctttgttgtcttgctgccctcgtctgcgaccccacacatttcctttctttgtacaaacaatactctgtacctccgtgctgcgtgtctcaactgcgtctttctggccctgccgtctcgtcaatattttgtccaatacgtgcctggttaggtatctcgggacctagaaattccgtgccgatcacggggttccgaatcaacacagcaccaacttcgagttgcaacctccaaaccttaagccatgtcaactgcaactagacgaggagtgttttcttccgctatttcaggctacacccgattcattttgcgcgcccggattttgaattcccccagaatgcaccgatcttggtccgcaaatccacgggtttcttttaccacctcaattcaaggtcaggtatggtctccacgggttttcagtctggtaagcctagcttatgctgaatgagattatctattcagaccagagttgggacaagccggatttccacctttataccgccggtcgctggctgttcaacgagactcaacagctagctgaaagacgagtgaacttcaattttgatgaactcgtgagagttgccatggagagcctggatttcggcccccatgtctgcacggaagtggaaaagctccccgacggaaactacagcaaagcattccttctcaccacggaaagcggacatcaactcgtagccaaggttccaaatccgaatgctggtccccttttacacaactgcgagtgaagtcgccaccatggaatttataagttcaatgaccccattgttatggtccttcataataactctgggcaggcaagtaccatcgcaggaattccagtgcccaaagttcatgcctggaataatagcgcagaggataatgctgtcggtgctgagtatattatcatggagaaggcaaatggtgtcttattaagctcacagtgggcaacaatgagcaccgaccagaagcgggagttgatccaaagtatcattgactttgaacgctcccttattgctcattcttttgacatgattggtagcatttactatgaaaatgatctagcgaactccaaagatggatgtttgtcaacttcattccctagatttgcgatcgggccgatagcggatcgcaggttcctggaagatggacgaagtgcgatcgagtcttataaaggaccatgtgcgtttttctacctcttgaccaccaatgcctttgtctgacgtgggttcagctagggaatacaatgattgactatgtccattcgatggcgagtcgcgaagaagattgtagcaaacatcttagccgattccccagaccagaggggatttttggcgcgcccgggtcatatcagcctacggctcaagcaaaactcgatgttatctctgatttccgcaaaattgcatcctttatagttccgaaggacgcgaccgtgacaaagcctgttctctggcataccgacttccatgcggataatatctttgtggatccaaataatccttccaagatttttgctgtcattgactggcaaagcgtacatgtcgctccattgtgccaacaagtgattacacccgcattcctgaatttcaattggccaaagccagatgaaggtctttgtcttccttctcttccagacaatttccagacattgagcgccgaagagaaagccaaagccaaagtcttacgaactcaacaattattatacaaactttatgaaattcaatctggacgacagaataaggatgttttcagagcgcttcagtatcccaacgtacttggatcccagattatttcactcgtatcccaggttttgaacgacggtgaaacaattatcaagggccaattgtttcaacttgttgaacagtggagaacaacagttggcgcagatggaacaccgtgcctgatcacctttactgatgatgatatcgtgcagcaaaatttagatcaagagaagtgggaagaaggtgtgcagctcatggaagatgttctggaagctcttggcggtgcagagaatggttggcaaggctgggtaagtcatgatgagtatgcgcaggcgaaggtcaaattggagatggtgaaggaacagttcttggatcatatggcccataatccagcggagagagaagcacggtgctgggcatggccgtttcaaggtcaagatactcacactgaacatgattggctaagagaggagacaagcaataaccacttgagactttgataaatgccaaggatggcccccaagttgacttcaatataggaaaagtgctcaaaccagctcactccaaatggaatcaaaagcgtttattatattgcacaattacgctcttattcactccatgttaaagctacagaatttaaaaatgcggtctctttgttttcctgctttctttcatcgcctttccacctctactacctttcttcttgaacgcgtctttacattcggattattccaattttttgtgcgccagtagtgtgcttcccaactactatggccgacgtgagggattctgttgaaggaaacgtctctggagacgaggaagacgtggacaagcaaggacttcgggccacagaacacgatctggagcaagccaattccaaggctgtctttaactcgaagaaagcactgtggggattcttggtgctatgctattcggtacgcggggactgatgcttactttggattgacatctgcttgagcgagatgacatgctgataatgcattcgcccaattccagactggcccaacatcttccatggtttcgaattatgtgactgcggccatcctctcggcagccaatctcctgggccaccaggccggatctaacaagccatgctcacgccgtggaacaaacatcagttgtctagtggaattcggtggaggggagatcgactataacagctatacgtgcgtatcgtggcattgaggtgcggggtgactttgctgacgagaagaaagattgtaccttcgagcaatcagtcgcgccatggaaggcatagtatcgattctcacggccggcttagcagactatgccagtgagtagaacgaattgacacctttggatttttagcgctgatccagatacctccagactaccgcaagacgatgatgatgacctcgatatttctgttcggggcattagccttgccttttgcaggactcacgggtcagagttatagccatctgaccgccttgtctgtgctatattgcttcttaacgacggtcggaggtgtctatactgtgatcgaggggtcatacattccgatctttatgagatcgacgggctggttccgtgactcccttgtagcggcaagccaggacgagagagcgacgtggaacaaaggagtctctattagtgttctggctttggtttcgggcaatgtcggtggcttgactgccctgatcatcggtgtcattcttgtgtatgggcgggggtcttatgtgcaggttgggtacttcaactacgttctagccatcacaattgcgggctgcatcacaagtaggttgtacttagttctagatcatgaatccccgatagctgactttcccagtcctgtttgcattccttggccagtaccttctcccatcagtgcccggcaaaaagctcgaccgcacgaaaaacaaattccctctgctgatcgccttcaaaaactggctgaaactgctgaaaagcgtaacgcactattcggaagcattcaaattctgcatcggttgggttctatggaacaccggctattccaaccacctgcagctcatcggcgcgctcttcctccaggtcactggattttcccgcagttccggggtatactcggtctggtcctttaccagcgtgatctttgcctgcacaggcagcttgagcttcatgtatctccaccggcgacttcggctccccgtgaaatcatacgcatatgccttcctcgtggtgaatatcctatgtgtgctgtggggctgcatcggaatcagcaaccatgttacaattggttataagcaccaggtcgagttctgggttgagcaggtcctgttcatgtcgactagtagtgcgcttcgggcgtataaccgtgcaatctactcttccatgattccggagaactcggaagcgcagtttttcggtctggagatcactttggatctcgcgactgggtgggtcaatcctctggtaatgggtattatccaggatcggacgcataatttgcgctttccgatgattccgaacttgtttctgatgcttgttggacttggtctttactcgcaggtggatattggcaaggggatccagcaggcaaaggtaccgttggtacagtaggttgacagagagactggagttgggaggtttgatcatcgttggatagaaaacaggaaaaggcgatcgttcttgcggtcggatacaccgccgatctgtggtgaaggcgtcgcttatgctgaaagctttggtgtcttgtcggggcttttcttgtattgcctggttctcaatatatatttgtcgtgaccaacagtatgaatgacccctggatttcttttccgaccacaaataaccgcagctttagatactcctgttttaattagttcttcgtcgtcgcttgtgttgttatttacggtagaaagtccttttagactgccgacaagtatcacatcgcatactaaagacatatagttgctacatggaaattgaaaagactacggtatattctcttcaagtgatcagttatcataagcagcactaatggtgtagtggtaacatataacacttccaagtaatcatccgactactaagttatgttgtgccgggggttcgattccctcttagtgcattttttgatatttttttctttttcatcgtgacatgagttagaattctattgtctctctctgtacaacgaaagagaagagttaatggattaatgttctgatctcaataactatacattctgcacaatgagttcacatgtaaccagccctatgaaccacctccaccacgtaaaacaatcatctacaccaggtccaagaccaaatagataagtgatctttagttgttacacgtgtatatatacagactatgaagtacagcgcacataaagttgacaatgacattccatatacccataaagcaaaaaataaatcgaacaaaaaccaatgcaagaccacccccatgttcgccgcgaaacgccgtgccatgatgtattggggacaaaaaatcgcgcatcaactgtagggggtactcgcgagaaggggaatcagtcgaagaagatagacaaatgagatgcgagagatgacaaaagagacaaaaaaaaaatacgacaaatgagatggcagacaaaagaaaccctcaaccagcccagctcccattttgtccagcagagtagagacaagctaatccgagaaagctgtcatgagatgggatatgatagatgcggttgaagcaaaatcagaaaacaatgcggatgggatattcgggcacataaacataggaacaaaggaaacaaaaagggaaacaacaccgggaaatgagatcgtgtactttttcatgtccagcatctgggaaacaaaataaaacgagacgtgggaaaggagattcaaccaaggaaatgaattgtccatggggttattttctcggtgctcgcaccggaaatgaccaaatggcgcaatgattagtccctgtagaccctgctacagaggattcgagtatgattatacagtacaaggaggaactccagcctccgattggtatcagtatcaggttgtagatgggatgggagcagtgccagtattagccgttgaccatgtcatccagggccatcttgcgccgtttgatcggtctgttgtcgtgaccttcagcttccatgctgggcggttcggccctcgtcagagaaggcgagtggccagatgctatctggatcggggatggcagttccactgggccaaggtggcggggtatgggatccatagttgcgcttgttatggaggaggagcgttggtgggggagagggtagttgaagaccgggcctgcagatctgtggagaggtagagcgcgggggtcgtaaaggggttcttcccggcctgggagagtccaattcattgggtacgggtcgctcaggcgatggacatggtgaggagggggtggcccagctgtggcttggtggattggggggagccggactggagattcgacggtatatggatcccgaggtgatagtgatacccgtgaatcatttgccgttgggcggataggattgccaggcgtctcagtatacggtagaaagggcataccgactggtggtggctgatgttgaggaggtgatgttggtggtggtaatgctgggacaccgtatgtttggaatcgtcgatccatgccaccggacatagtgttgacttttaagaccggattcaaccctgccattggcatgtacggcgaaggtacatgtgagtgcgtcggtaccgaataagatggcggtccagatgaagagaatgggcgtcgaatcatacccgggacattgggcgagaggtccataggccgcgtgagaggaaataccgaagcggaccaccggtgtggtgtccgtattcccgagctgacatctcccaatccctgtagatccgtcatgggacgcagttctcgtgaagaagtggcccgatgcatagcggtccgccgcgggggcatagttggctgagcctccgctgggacagccgggttatccaagtgcgtggtgtatgacttgacagatgaatcctctgcttttaatgggggccgtcctcgctttttgtgcgtgacgtccacacatgttgactttcctgctcgttagttacaattccactattcatgagaattcattaacacttacagcctttccagcaagcacacatcttcgacatggacgggctgggtcacatccaagatgctttttcttgcaattgacacaagctgatgccacatgggcctttgtacgtcgggttgatttctgtgctagtgatcggcctgtgggatgcgttgggtccaatgttggtgctcctgctagcaatggagatccagcatacaccggtccctgttcgttatatccccgtgacagtggctcattaaccggtatttgcgatagctccaataccggcacagcagaccgctccgtgaatccgagagagggaggatatccccgagggatctctgcggatagctccgagggctttgctggaggagatccagacatagattggtggggtatcggagcccgggggctgcaccctcgagcattgggggtccaagatcgattcaacggcagccgctctgggccctggttgaatcggggctgtccgaattgggatatagtgaggctcggggggtgaagcacgagtgagtgcatcggatgtcaagcaggaaagggaaagggcccacggggcaaatgcttctttcggcctttttttgttttttccttttttttttcgttctcggtcttgctggattccgaagtatatcttggttcaatttcacaagcagagaccgctgaattgcgcggttttttgagacagcatgtctgagtaatagatctgggagtaactagcgacacagaaagcgcggtgtagggagaatagaaaagagccagaggtcatcaaagttcttccaatgccgtccgaggacccaagcttataatcaaggtggatcgatccgctattggaggagtcagaaaatagactgcatcgatggggagatttctagatgacagcagggcacagggttactcatacgcatgtcttccctagggcgacttattgcaggatggcggtcgatcattgagctaggatcaaggtgcagtaaaatgtcaaagtccccaccccacgccttacctcttgatcacacgttccacgttcctcgagggtatttttgtgtaaaggggagaaaacggtgaagtatatgaccgaaagtggtgcgaggtcgcccaaagtaggggaataaaaagtacacccccacttgaatgttcccaaggcgttcgatagtccaaacgaaccgctgaactatcacacaataagcagtgtaggaaagagtagtggtccatgcaggcgctagtagctgatagatttgatcttcgtcatggtagatcattggagaataatgggtttaacgggtgcccctccttagactcctttctttggaggcctggtattagatacattcgatactgaaaaaagagaataaagaatatattgcctcctctccctcctcccccctcccccctnnnnnnnnnnnnnnnnnnnnnnnnnnnnnnnnnnnnnnnnnnnnnnnnnnnnnnnnnnnnnnnnnnnnnnnnnnnnnnnnnnnnnnnnnnnnnnnnnnnnnnnnnnnnnnnnnnnnnnnnnnnnnnnnnnnnnnnnnnnnnnnnnnnnnnnnnnnnnnnnnnnnnnnnnnnnnnnnnnnnnnnnnnnnnnnnnnnnnnnnnnnnnnnnnnnnnnnnnnnnnnnnnnnnnnnnnnnnnnnnnnnnnnnnnnnnnnnnnnnccccctccccctctcctatctaggacatcgagggcgtgcatttgacagaacgctgtcagtgccacccccccgagcgggtaaagggaagggattgaatgccactagtcaacggatagttcttttcccttttctttttctcgttttttccatttttccgttcggagaggggtgacagtgtataccaatcagggctaagcaaggtggaagattgacggatcgacgtcggtgcccgcagccattgccaatagtcgacctcggcgtggactatgcgcattccgagtacgggaggacatgtactccgtattttacgcatttaattctattctagattggatctaagatagcaggagagtcggataggaggatagtaacctcattgaattgtcgctggtggtcttagggttgcaatcgggaggtcaccttgaccttcacgtctcctttgggcaattataaggtcaatcggagttctttcgccttagactttgtgtcttgaatatttaatttccattgaaatgtcctattccttcttccccagcgaattaatcgccctaaatctagccaatctgaatatttcgactccacaacatcgcccggcagttcgatgatctcccacttaaaccctttaaatgctcctaaaacccttgaacccttttaaacattgagaaatccccttattctccgatccacccgggtaaatcattgtatgaccgagtcgatccttttatgctccgtctaggggttactgttacaatcgcagatcagagatggaaaggtctcacagggttttgaccgtggtcgagtcggacaagtgcaggcaccgtaaatgtccccttttttctcctttttctcctttttctttttggggattttctggaaataggttgcgggtgtgataccgagtctcgcaataatcagtttcctgtgatacccacacttggggggcgtttttctcgcttttttttctctgcgcttagactcggactttgtattggaaccggtggagtgatattgaggaaagagaagaagcagagggtcctgaacggtcttaaatggtcccaagggctccaaggagaatatctggaaaaggactcggtgtctttatttttccggggaccccaacagcgatgtggctgcagccgggcgatcacattcgatcacattgtcctttgcctctgctctgcgcgtgcgcatgccgatcaccatccctggctttggaactgcaggattccttggatctcacgtcatggggagggagtgtgtggtatatccagagcctaatagctgatctcctcctattcgttgtatcgatataaccactctatggtgttataatatagcatagagtggtgtgatcatatcactagttcatgtatatataaactcggcaggatccgatcaagggaaaaggggtgtggaacatgcggcacgcggagcagcaaggggtctgtcaccccgttcatgcaggatattaaatagtctagacaattatacggttggttgctttgtgaatcttttccactgccaatcataagcctattcgtctgttatttgtgcagtttatactaactccgacctctcgcggtatagtgttgtagccgccgacgtgcccaaagtccagaccagactatgttatagtccagactctattaatttgacgagtggagctcatcactagcactatttaattcttttaatctaaattcctgatcagatcaaaaatcgccgaatcattggtttttagcgttaaatagttccggttagtacggagattattcggaacttgggagaattctcctagtgcaacgtctaaaacttgagacaatgtctatagtttctatagttccatatacttaattaacttgacgtgccgccaatccagatctgggcatcgatggacatcctctaacctcttaacggtgaccaaagcgtgtgattgggctgatatcacatcttcctccatcacggcccatattgatctacagtttaaacgtgatggcctggcccagtgccaatgttgagtcagtcacatttccaatcggtctccggatactccgttggagtctaggctacacagcttcttccatgtgctgagctgggcggttcctaaatctcggattcatactttggacatcggaataaaatctccgaaacacaaattgtggtatctctgcaatatagacatctattctacagtaaactttttcctccgtaatcccctagcgtctcttcgacggccgggcattcttatcgcgacgctgttgcacctgcttccgcgccttgcgaatatcctccgtagaccgaagttcgctctttccgccgtatgccgctccaccaagcttatcgtgctggcgttcgcgcgccgcgtcgttcttcttcttcatcttgtcgtagtcgccacgcagaggatcggcccgcttaggcgcccggtcctggctgtgtcggaatcggccactgctcatgcgcgagttgacgttgttcatattaggcgtctcggcctcgccaacacgaggcatccgatcaacgcgcttgcccttcttccaggcctggaagcgaccgctgcggaaactggcggcgatcttggctccactctcgccgcgcacgagtcggctgcccttggaaccgtcctcgtcgttctggcgggcaacgtacttcttgtgtcgcttgtcccagcgcatgatggaacgcgcttcgccgaacccgcgcttgccttcgtcgccgttgaggtccatagtcgcgttgcgggagtcgctggcaaagttcgagttggtacccgagtgcacaccgtaagccttatcttcggccatgtcgttgtgctgaggtgtgtagcccatgaaataatccgggttctggaatgctgctgctgcgtcttttttctcgccttgcttggacttggagttgtacgcagagaaagtgacttcgaggtcatcgtcggatgcgtctgacatgttctcgccggcatgctcggggatgtcctcgtcctccacttgaccatccgggccgggagtgggcattccaagcgctgccaactcggcctctgctttggcatccgctcgctttctcttgttctcgacactagtgcggagtcggcgaatggtgtcaacggcctcgttgtcagccactttgccgcctcgtcggttgttcgcctcgaaaatcgtttcatgtgggcggtaaccaccaatgcgggccagcatactctctcgctctacttccctctcagtggttgcatcattgaagagcgggtgaatctcagcccagtgatcagaagacacaacatccttggcccgtttggcactctcggcagaagccgagttgcgggtgcgcagatatagcttctctcccttttgagacactcccttttgtccgtaaatatctatatcatcgtcgagcaccttctgtacccattcgcaagtgcgagagattgcctctctcggcagcgttcccacgacaacatcctctgcaaagttgacttcagtgccatactgacgaccgaggaccaacctgcgtcccaagaacagctgaagatccagaagatacggggcatctttgtcgcgaacaagactgtaactccaacccttttggcctgcacgagccgtacgaccgacacggtgaatgaagatcttgggctgtgaggggaaatcgtagttgatgacgttggcaagaacaggaatatcaatacctctggcggccacatcggtgacgactaggatatttgagattccggatcggaagttttgaacatggtgattacgagcagtctgatccagggaaccgtaggcgtaagaggtggcaaaccctgcctcggtgagaagagagtagaggtagtcgacgtgatgcttggttgcagcgaacacaatagttgagtgctcggtaggtgactccttgaagccgctcgggagacggacatccgatctcttgcgcttccttgtcgggttctcggcttcttggcgtaatctcccgccaatatatgtctcaccggtaggcatcttgataatgttatgcaaaatatgtagtagggcaccttctttatctgccgacttcacagcaaagaaggcattttgtagatccggagaaactttgttctcgatgtccagacgaattagacttggctcttggagaccagcacgagcaaattcgacaagcgacttgggcaatgtagcggaaaagagaagagtctggcggttcgtgggcaggccgtgcaaaatctcggtcaactgtgcggcgaaacccatttcgaacagtctgtcggcttcatcgaagacaacatacttgatgctagaaagatccatgtccatttcgaccttcaagtgcaggaatcgaccgggtgttgcgatgatgatatcggggttgttggccatcatgccgaactgatcttccagactgtcaccaccaatgagaagcaccgatgtcaaatttgttcccttgcccatctccttaacgaccttcatggtttgtagagccaattcacgggatggggacatgataagagcacgtgcaccgaacgaggtgctatggctcttcaacttctcaatcataggaataacaaacgaggcagtctttccggaaccagttcgagccataccaaccacatccttgtcgtccatgatcatgggaatagtctttcgctgaatcggggtaggcacggaaaatcctttgcgggtgatcgctttcagcagactcatgctgagacccattgcctggaaaccaccacccttcttcaccgtacggcccttgagatttgcgccctttcggttggcggacgcctgcgagttcgcaatgaaagccgcatcgccgtcgtcttcgtttaaaaagtcaagatcttggtgggtatcgggcttctggggctttttcttggggggtggctttgcgccgtcatcggaatcgctgtcatgttcaaaaagggattttgtgatgtcgaactcgacctccgattctgcgggtgaggcagcacggggagccattgttgcggtatgctgtgaagtctcgactgatatggaaatgcagtgataagcgttagaccgtttggctcttcaatggccggggaatatgaaacacagaaagattggcagtgattaattaatgtatcacgcgaacaaatcctcgactactcaaacttcagacacctgaagaaaagtcgagtcgcttatctcgctgtctttctgtcgcaaaaaaaaagttgagagaatcgtaggcggtgaataccggatcaaccatcgcccgcgtgcaaactaaacaaacagaatttatacaatttgcgctgaatgtggtcatagaaacattgtctatttggagtttcaaagatttacagagacaagactgtactatacatctaatatgtacctaatatgtacctgcattgtggttcgaaatctccagcagctactcgatgtgcagcccagctggatgaagacacattggacagtccttttgaaatttcaagatagtaatcatcaaaagatagcattttaagagtaatcaatcactacaaaagtcaatatagcatctataatgtcgaagttcagagcagacgattttaagtagatccaattcgagaggcggtctgaaatggcaaaacacgatccccgcgacgcgtgcgacacgctcccaattaagtaaaatggtgttgaagaaacagctgtaccttgacctttccccttcacaatctcacatacaccatgggtatgtaccactctaaatctaagctattactctagccatatctaataatattgtcagacggcagttacaacaattatagctcctcattcggcgggggtggaggattcatgccgggcgaggcgaacagtcccgcgggaggcaaggtatacacatgatccaggcctgtctttacaacaccaactgatatccaacgcagaccggtgaccgagacaacaaaacccttcgacccgtgacagcgaaacaagtcctcgatgcctcgcagcccttccccgaagccccatttcaaatcgacggcgccgacgtcgccaatgtcctcctcatgggccaaatacgcaacatcagctcgcagagcacaaacgtcacgtacaagattgacgacggcacgggcgaggtcgaggtcaagaaatgggtcgactcagccaccgcagactccatggacaccgacgatggcaaggcgcccgccgatgggaagaccgaggtcgagctcaacggtcacgcacgggtctttggttccatcaagtcctttggtaacaagcggtacattggtgctcattctgttcggcctttgacggatatcaatgagctgcatacccatctgctcgaggccacggctgtgcatttgttcttcactcgcggcccgcctggtggtggtggtggtgctgctgctggcaatgctggcggtgttgatgctgttatgggtggtgcggatgattacggtgctgggcagaataaggctcttgcttcgatgtcgcttgttgcgaagaagatttataacctgctcaagacggagcctcaggatgatacgggcctacatatgcaggtcattgcttctaaattgaacatgcctgcgtctgaagtgggtagggctggcgaggagttgcttggggctggtgtgatcttttctactatggacgagcagacgtgggctattctggaatactagagatgagtggttgtgtctttaaacgtcacattcagactccaatgatattatgatttgtcttgtataacacttgatagagtcgaaacatgtagcaaaattgacaacaggcttgggtcaaaacaagattggaacataaatcacttgaagccgctaatgcaaaacgagatataaagaacatatgctggaagatttgaccattttcgtcatgaactgcatatcaagtcgtgtgcatgcttctcatataccaagggtcaagttaggtcaactcattcctcttgatagcttcctcgaccgagcgattccaattagctcgactgataaaggtggcctcgatgagcgaaacaaggcccaatgcaagcgcaactccagtccacaagcccataacaccccaacccaaagcaaaggttgttcccatactaagcggcatggcaatcacatagtaacagaagagttggatatagccgcccacctcctggcgacccagaccacggagaataccgttgcagtttgccgagagagcgtcgaaaagctggaaggctgcgcagagcggaagcacctgcgctacaatttcgacgacttcgggatcggagctgaacaacctagggatataggaccgcaaagtcgagagaaggaccatgttgaacacgccaacgatggctgctccgaagaagctcactttcgcagaggtctttgcggcatcgaccaaggtagccccgatcagatttgctatccgcgtgctacctgcaatagatagggggaacggaatctgccatgtaatgctggagattgttgctaggatggactgcgctgcgagtgcggatgtgccgaggtagcttgatgccagcgtcaaaatttcaaatgccaggcactctgcctcgaccatgatcagccctgggagggcgagacggatcattgggccccagttctggaatgctcgtctggtgaatccgcaccaacactcggatcccacgaagaaataaacatagatgaacaggcaaagcgggaggagattttcggttattacgacggcgattggcgccccaatgaagccccattgaagtttcttttatacaagtcagtattgtcctcgtaaaaggctggaaagtacctacccagacgaagaaccagttcatgaacgcattcagtggcgcgcagaaaatgaggacatatagggaggcagaaaacacaccctgggcctggagatatcgcttgccactctcgaaaagagcgaatcccggggtgcccaagagagcaaccttcaaatacagacccgccatctgggcgacctccttctctggcacgatcttggcaaggatatgctcagagaaataccagagaaacatgatcggaatggtgataacccaaaggaaatacaccatacgcagcatctgcaggcccaccaactttctctttccagagccgtaggcctgcgcacagagggtatccaaactagttgacagacccgagtacaccgcatttccagtaattgtcacagtcatactcgccagactgacagctccaagctcttcctttcccagatggccaatggtaaagatactagccacagtcaaagaatactgcagtaagaaagtgaccatgagcggcaaagagtatttcataatgacctttgcttcgcgctgccatgtcgtctggatcaaaccggctgcgacggcctctccccatttccgatcaatctcttccgagtccaatccactgtcctcggcatcggaagtccgctctctaagtagagcagtgatttcgcttgccgcgtccgactcatgatcactgcttctcgagcgtcgagaagctccacttggccgtcgagaccgggatccttggccgataatattgttgtcactcagtagctgccgttcctctccgatgacttgatcgcgctcgctttgggaaatggcttgctgttccccagcccatgggaccacagtcgcatggctgacagatgtcacataactcgggcggcgatatgaaccggctaaagagcgggggttggtgctggtatagctgtcgatccggcgggctgttgaagtgtcggaatcttcatcggtgggtgttcgatcctcctcgctgtagtctgcgaggtctcgggcaattgctgaggcggcaatgggcgagctggatgtgaaggaacgaccaaatgggctttgatactcggcggaatccaccgagcggatgttgcgggccatgataagatgtgagagacgagtctatgggtgttttacggccaccgcattatttacagccagataattgagctatctcggggtgagactctagatccttggagctttggagatatcgaaggcaaaaagcctgcagagaaaaagacggcctaaagctggatgcggagatgtatttgtaataccagcaatacgaccggtccaggtgcagacactctgtatatcgtgtaatttaccgaaacagcccccgagtgataatgcagataacacttcagtaagggatgtgagtcaaccaccggagcgtgtgattggctgtcactatcacatacaaggttcttctttactaaatccagtgcccgaagacgacgctaaatcataatcgcttcttcctaaaccccgctaacacttagtgggaagctcgatgcgggcagtgtcgccgtgatctcacttgatatggccacccccactatgttgtaccggacatgaactcacggcctagcggtaaaggcatcgttagtaaggatatgatctcggccacttcaacaatcgcgtcgctatgtatataaccgaggtgatattaccataaagaacgagcatagatctgcatacaagaacctgatcacgatcgtcctagtaatgtgtgaacgctggggctgtcgatcctcagacctgatcgtacatccatactccatactccgtacagcatactccgtacaacataacagatgagcaatcagaaacgactgtgacatcattcccaaaacagtataggctatcacatgaccggcctttgaccccgtccccgggttttctccagacttcggggatgaccgagcgtgtatcaaccctctcaccatgtcactaatggtgacacaagtaggggttggtcgtgctcgcttcaaccctttggtcaacccggtaaattcgaagccggtcctcgtggaagagtaagtcctaaactgtccaagcaatcgccgaacgagcgcgaaatggctggagagcagaacaatggcttggtcccttacatgacgctgtacttcaaaattaaagcctggcatgcgccatgaaagccatgattgccatgatttacacacgccccacgccacattctgccgcagtgacaggccagcccggttgacaattttaaagacacatcgagtcccagcaccacatcttcctctcacgcccttacctcggcgcgctcttattcgaaaacagctcttccgatgcccgcgaccactgcgccaacgagcgcactttcctttcatggctccgtctgtcgatgtatctggcgatcgtgtcgatggccatcatcatctccttccatttccgcgatcaacccaccggcctagagagacgcatggccttaccgctcgggatcatcttttggattctgagcttgacctgtttggctaatgggtttgcgaattactcgcgtacggtcaggaagtacgcgcgcaaggcggctttggtgcagagtggttggaaaacgcaggttgtctttacggtcgttgggacggtcattctgggcagttgcatcttgtttttgtccacagatccagcgcggtaatggtcgttctggggtcggatttgtcgatttattccattagcgctggcgttggtattcttgggcattttggttgctttctacattcgttattgtattattgtatttaatgtccagatcaggtctcagagactacttggtaatattcaaagaaaactcgaaaaatctcagaaccaagcgttgaatatattgtaattttctcctaaaataaacagagaggccaaagatcagattatgatgtcgcgagaagcgtcttgtgtgcagaggtatatttccatgaatctcgtaaaggaggctgggtttgctccagggaatgcaaatgacaaaagaaacagcgcatagaccgaaatggaaccaaattatacgataaactatacgtcgggacatttacatccgacggatttcccgctcattcttgtacttctccagggctggtgtaccgaggtggctccaccactcgaagagcatggagttgcagataagcttgaaccagggggtaaatgtcaaaccgggctgctcgaacattgccttaagctcatcagctgagacgtaggtggtgtctcggacctcgttggggctgggatccagatcgacatcggcctggatgaagaggatatagtccactagcaaaatgtcagtatttccatcgaatcagatctatattgcatgtaacataccctcgtgctcaccccactttccatcgctgggggccttgtagtgaattcgggtgaagaattcaaatttgtccaggggtacttgctctgccttaatgcccagttcgtggtccagcttgcgctgcgcagcacgcttcacacccagtacggcagcatcgagctcagctccagtctcgccgggaatgccaagggggtgtgagcagcaagtgttggtccacatatcagggaaggtgatcttctcggtggcgcgctgttggagcagaagacgcttattggagtcgaaaaggaaaactgaaaaggcacgatgaaggagacccttgtcgatgttggtcattaaatggcctatgcaaatgcaactgtcagtgtttttatcttgccatgttgtgtccactaccccgccattctgtacatctgtgggtgattataggatgcgaaacatacaaatcttcttgctggcgcttccaatcggccggtcattgttatccaaaacaatgcagacctcgtccatcaggcggacctgctcttcatcgtatccctctagttcgctgccgcgcgcagtgtttgtttggcttatcgggaggacctcacgggcgagcgatgtatcgacctcgggaaagagagtggcgacattgtccgccgtgatctcaggcgggcttgtgattgtcatggttgcgctcattttgactgaaaactaaggctgaaaagcaaagctgaaagaaagaatgagaatcccaaagaaagaattcggaggaaatgcggtcttgggtcaaaggcggcaatgatcggcaaatttgcctcggattccatccgcaaggttgttggccgggggaacttgggattgggaatctccagacaacattctaccaaggacaatctatggcttacaaaaagtgactatataaagatcagaaatttcattcaaggctagatctatctgtgtgcgaaggccaaaagcatcaattcacaccaagccatcatgggcatcaagatagccttgatcacttcagttcaaggagactagtcaacttctccaattctgcaacttcctctggccccaaaaggcccaacttctcccgccgagttggcgcattcgggtcaaacacaggcttctcagcgagcgaagtcacccgtgttccgtgtctaggctgggatccctcataatcccagcttgcgttatggatcgtgatgctattgaaaataagcttcaaatccaagacctttcagagtattgactaaccggttatcccacaatgcactcgtgcgtggactccatttaaaccgaacctggatatcagggttcttctcataaacgtcgtataggtatcccagaatcacatcactttcggccttgtcaagcccaacgattcggtctgtcatcgaccggttcacccacagtgccttccagcctgtagctggatgaacacggacaatagggtgctcgcgctccacatactgaggccctgcttccgggtccttacgatcgagatatgggtgagctgagcggtagatggcagtccttccgtcaataaacttgcggaataatggcgacagcttctcatatgcggcgtatccactcgcccagagggtgtcacccccgactgtcggcactgtgtcgttgtggagatgggtcactccggcgggctgtctctcgtgtacgagatcgctatgccagcgagacgctcctcccggccgacggaagctcgctggtctctctgttgcctgcaatgctggccacataacactaacgccggggaggccagggacttgaggaacttgcggctagaagaaacacagttggtgattcgcacatggattcgctgggttggaaaaaacatacatgaacctcaatctctccgaaccactctcctagttccttctgttgctgaggagtaatatcctggtctcggaagaagacaacacttcgttcggcaatcaataagcctagctcatccttctgctggtctgtcaaatccttcagctgcaagccgacgatttcagttccaatgtgcctagtcaagtcaatcacttccttggctgcagacagaagtgctttcttctcgggatcggctcggctgccggggtctacatggacgcgatcatagtttcgcacgttgtaaacgtcgtcaatatagaggggacgagatggccggtacgggtagccatcgctgagatcaatcccagccttttctaggcgttctcgtgcagacacaggaaggccgagagtgtccttcttgggcactacgacgtcgacgatgcgtgcatcaattggagcgggagccatgatgatagataatatttggaatagtataaatcctatgagtcctaatatcaagcctacatgcagtgctatatactctgtttagaaatgtcgacttgcttattgatcaacgttgtacaactggggtttgagcacatcatcgccatcaaccatcacgtcttttgcgggccacgcatgtcacttttagttatctccggctgccatcctcatacccctcttttaggacttgtaaattgtccaatctatactgctatgtgtacttagtcgaagcggggaagcttcgatgtcacaatccaatatcaaaatcacgagtatctctaatatctaactcgctgccgtttgttccgggaagcatggcgatatatcagcccatgttgtcgtttggagggcccataagtgcgcgaacaatccacgtagacgcggatatgcaaattatctctttgtctttcttttcgcttgataatcatgagtgagtccgttcgagttgctgttattggggctgggatcagtggagtggttactgctgggcatcttctggcagctggaattcaggtgacggtgtttgagaggaacaatgcaactggtggagtttggtaagatggtgaattgtttattttgatctggaataatggactaaagcattgtaggatttatgataagcgtactccgattgaagcccagtacccatcgccaagaccgtctgcttcacaggaatatgtgaaggatgagagggaagggaatgaaagaaaggtcttgcttcatgcgcctccggggtaggtttctgatttatgtttttttttaactatagcaggcgtactcactattgaccaggccttgttatgaaagtctcaccaataatgtctcgacacccttactacggaccaaactcaacgcatggccagaaggaactgctccttttgtgaagcataatgtgctcaaggaatacatccaagacacgtcgaagaaggccggtgttgatgatataaccaagtttggcgcccgagtgacccgcgtccataaggatggaccaaaatggacggttcactggagcactttgagcgaaggccaagatcccaccgagaaggaggagtctgcagtaagttctcatatctataaaatttttcattctcagtggttctgaccggatcatagacgtttgactcggtgattgttgcctcgggccattaccatacgcctctcgtcccgaatatacggggtctaccagaggcaaaagcccaatggccggagaggatcttccattcaaagtctttccgaaggtcggaaggattcaaaggaaaggtaggagcgactgcattctagtattgagtggcactgaactgactcaactacagaatgtacttttgctcggtggaggtgtctcttctctcgacatagccactgaaatcagtggaaccgcacatcacgtgtaccaaagcacccgaaatggtgccttcgatctccccgagagtgcacttccagaaaacgcatcaagaatcgccgaggtcgaagcattcgaaccttctacatcgacatccgcgaacaccgagcacttgcccttaaccgtacatctcaaatccggggagaccttgcacggtatagacacaattattctttgcacaggatatcaaatggcacttccattcctcgacgaatataatgattacacttcgtctgcggccgaggcaaatgataccgtgctcgtcacagatggcactcaagtccacaacttgcatcaagacatcttctacatcccagatcccacgctggcgtttgtcggcattccattctacaccgcgaccttctctctattcgagttccaagctatcgccgtgacagccttcctgtctggagttgcgcagcttccatctactgcgagtctccggacggaatatgagaatcgggttaaagagaagggacttggacggagcttccactcactcaaggataaagagcaaccgtatgtcgaggaattgatcaaatgggttaatactggaagagctgagcgtggtttgcctttgattgagggtcatactgagagctggattacagagagagcggctttgaccgagagacttaagttgattctggcaggaaagcttcctagggcggatattctcaaaagcccattggaggtgggggttactgcatgacctattagaatatagacattgaaagcattcagagaagtgatattcgtagtttcttgactgtaacgtatccccggaggctctgccaaggcaggtgcgatcctgctccttcccatgttacgccttcctctcgaggtctcttcatctctccacctatgttctttcccctttagcatgcgatatcacatatttacctcatcctgggaccatgagcccacagcttcaacggcaaggcaggaatgggcccgcgcctacctttgcgggtccttcacccggggtaagcacgtcccaacgtccctcagttctaattcaacccccaagccacatatgacaaggtcaccgcaacggcctgcaactaggcttaccataaccgtaaggtcgcgcagtcgagttctcaggcagccacgagcacgcagaccgagcttgataagaacgacccacgtccccgacttcatatcattgttgacgccaacggagattcggctgtacgagcgcatgtcactaataaagcttagataaaatataacgtgtttcgatatgtcggttcggaaatatgagatatatggcgagatgtgcaggggcgatggcgagtttctagcttgggatgacaacatcatcaccacaaatcattccccaagttggccaagcgcccaagactggacatctcgcacggattatgttgaaaaaacttgcatgaattgcgcgaacaagtcgccccttcattcgacgtgaaaattgtccgcttgatgcggagtataaatcttgaagcatgattcactcggctttaaaaagggccccgatatggctccattctatgctgacacaagctttgacaagacgatcactgactaggtaggctggccttgtcaggttagtaagtctttgatattaatcgcctgttagacttggtagtttttctgcgctataagaacgttccgatgtctccaatccaatcttttttctcattgccacgacatcaccatgtcgctaaaataccctactgaagctgttgtcgatccggcgacacagatagttcaaaaagaacccaagcgcaaatgggtcagctacatttgggacacatttgacaagtcaccacaggagcgtcgcctgcttttcaaattggattcggccattttgacctttgcatcgttgggtaagtttcatgaaactaattatcttggaaaatgctaatagtcataggatacttcatcaagtatctggatcaaatcaatatcaacaatgcatttgtctctgggatgtatggtaccatattgacccaatctcgggagtttgatattgacaactcataggaaggaagatttgggcatgtacggcaatgaactcaactacatgcagacatgctggactatcggctacgtcattggagaaatccctagcaatatactcctaactcgcatcaaaccacgatattggattccggctatggaggtaagaggttctggttctattttcgagagctgtatacttacttctcaacagcttctttggacggttcttacaatgtcgttgtcacggtgcaacactcctactcatttctatgttcttagatttttcgttggtatgcaataacttcaagcacttactctatcatagtgggttattgacattgcaacactataggtatcgccgagagtaccttctatcccggaatgcagtatatcatcggctcctggtaccggaaagatgagttggcaaaacggtcatgcatatttcacacgagcagcggaattgccagtatgttttctggttatctgatggacgcggttttccacctcggaggacgaggaggcttcaagggctggcaatggtaagaaactggcaaagtctcggcattgggtcatatactaactaccatcaaggctttttattatcgacggggtcatttccctgcccgtggctattagtggattctttatccttcccgatgtgcctgagatctccaatccatggtatttgagtaaagaggcaagtttgctttcaaaccttcgcatttgatacaggtattgacatcaaagtaggaggtcactctcgctcaaacgcgaatgaaattagaaggaagacagaacagacagccatacacaaagtcaaagctgaagaaaatctttacgtcgtggcacatttatcttctgacattgctctacatgtgagttgaatactggaatccatctaggactaaaagactgactcaccaattttagatgtttcaacaatggtgccgctggaagccagcctatcttccaacagttcctcaaagactcaaaagatcctgtatattcagtcagccagatcaactcgctaccaaccaccaccccagccattcaagtcgtgacaaccctcgcttacgcgtggatatcggatactgtcctaaacggcaaacgttggcccccgatcatcttcggtgctgtgagtgtaacaccacataaggaaatgatagaaaaatctaacactgtcccagtgcgtcaacatcataagctacgtctcgctcgcagtgtggaacattccgttgggatggaaatggacatgctacattatcagcggagctggatatggactcagtggtctgttaatggcgtaagtcatatattccccaggctataaaagtgcaaatgtcctaacacaattaccacagctgggcccatgagatatgctctgacgataatgaagagcgatccttggttatcggaagcatgaacgaaatggcgtatgttttccaagcatggctgcctcttgtcgtttggcagcaggtcgatgcgccggaataccgcaagggctttatcacggtcaccgttctgtttgtaatcttgatcatcagtacttttgttgtgcgcttccttcacaaaagagagaaattgagaaaagggtaagtatcttgaaagtgtgttatgcttttaggctcgtgcttgctaactgatgtggtatataggaaccagactcacgaggcagaggagacggaagataacttgtcagattctgcagaaacaaccgatattgagacgaaggctatcaagtcttaggatattgatgttgttcatctatgcttcctgagatggatataccaaatggagaatagacagatagactcaaaggttaaaagtacgtataagttcccttaatcaatcaaaattctagagacatgaacggagtaacagagaccaggctttttctattgtcgacttggagagtagtccatatccaatgataatgctaaatattgatgagccaagcgttacaagttacaagcatatgttatcttatttcccaaccattttccaggctcgtctgacatctagtaagccccttatttaagattgagcacgaactccgacggagtataaaccaacaatctcggctacaagaccgtgtgatgagtcgtggtagcgtgtgatgtgatcgaatacccatgtcgatacccaagatcaaccaatcagatctccagtctccttaggatcttgatacaaagcccggtggttcaaccatacattatcgacttcggataacgcttaccgatctgactgataattggattgtccctgcatgtcgtcaatcctccatactccgtcgatgagagcattatcgcaatctagaaagatagccaggatttccgaagatccgaatctaaactcaggggtagattataggaataaatcgatagctcaagctagccacccgtgtggtgccgatttcaaagccgttgaaagtacggagtggtgttagtggcgttgcggactagtgaaggggatggacatatcctgaagtacaaattccaaaattatgatagcccttttgaaattgagagctccatcacaaaatgagacggtgggacaaggattctcttgttcctattcctggcccctagttcattgcggatacggaggaatccgtagagatcggcattgattccttttgggcaataatctcgagcttggacttttcttttttccagcttttttctctagcttggggccatagctccgatggggaatcatagggatctgcaaatcgaatgtgggaatattgagagacagcttcttattagctatgctatacctatatctccctgctcaatgtatcaacgtacttttttacctttgctccatacaatcccacccggagcaaacaggaaaatgattgccgatagggtaataagtacaaacgcctcatctcggagagcctatcgtggaagggatatatgactcctggattttccgggcccactcgcgaatctcaggggcaatggaatcggtacctgactctgctatattagacattcggatgtagtttatgatcacggaccattttctaaataggcgaacagacgcgatgtctcctgcgcggctgcaccggaggcacaattccaaatggtcaattgtggtttggactccacttagcggagatagcggggtggaagagaggattctggacaagaataatgactatttgtttaggaacgtcggattcccactctattttcccgtgcgagcaaggattaataaattgcaggaggtcagggctagaagtgagacacaacgcgatacttcacctggggatttgcgctttttttgtcggcacttgcgaaaacagagaacggagcaagagcgcttttgaaaacactaagacagttagagttgtttcacagtcttccttcaaagatcgtctgaatgtcgacgatccctcttaatcttagcgtgtgagtcggcgttcttaggtggagcgcggcaagagtcgagatcccaacgggcctcgaagagtcgaagagggggaaggggggtagtttttgagtcggaggcgatccctgggaataattccttggtgaatttctgttctcgtggaaataagtccaatttccacgcagaacaatgtccttttgggtctctcgtacgagtcgttggtccggacttgcattcatacacaatatgtatgttgtactggtcaacttcaaagacttccaagactctgatcttcagcatccctgctacagaccatgcagatcttgagctagaagtgatgagatattccttgctacccgcgcgccagctcatgcgcatgcaaatgatatcacattcgaacatgggaaatatgtacggggtaatatatcaaacagtagtatagtcaatttagtcaattgaaatgaattaaacaatgcgataagcaaaaaagaccacctgcagtacaataatccagaattccaaccaaatgcatcgtatagcaatccaacaacgccaaggaaatggggcttcatgccatgaaatatatgaatcctcataggagtctcgcattcatgaagcccagtaaaaaaaatagaaaatttgagtagctctgactagcagatcccagaatggcaaacccatgcaatccaagaaccatagccaaagacgatatatcccgatattcgtttaacatgcagacatgtgatcagctgtccgagctactagctagctgagcggcggtgattcggcactcgttggcgttgcttgggcgtgagcgaaggatcaacgtggccggtaaacttcgcagtgttgcgctgcttctccgcacaatcatgtctattgctcatattagtcccacgagtacacattcaaggataaatattctgggttcttacctggctagactatcctgacgactgaaacgccggtcgcaagagtcacagcagtacttccgaagcccgagatgaacctagagaccttgttagtgtctatgcttgattccgtctggcctccctactcacggtgttcatgtgtcgtttgagatccgagctccggccaaaagacttgtggcactcatcgcaaggatggttgtgcctccattcagggttgtgcagcttttggtgctccttgcagttggagcgtcgcgtgaattttgcgccacaaattggacattccaggccactggcagatactagcctgtcatttgacgcgcagcgctctattgtactcgggtccgtgacaccatcggagaatccttcgatagatgcttggggttgcaagacttgaccagtgttgattccagatccatcgtatccaatctcctctcccatcgccccaaggtaggacatgtcgttgacggataataggggcatcggagagggcatacacacgtccgaatacacactctggtcccattgtcctgcgccgttcggtacagtgaccacatccgatggcgttgtcggtcccgagcaaggtgtgtgcatccacatatcggtcatttggcccgcgaagacattctggccagaggcaatctccatgccagagttgtagctgggagacgcgctcatcgtcgtggggctgtagaaccccagtgaagtctctgaagcactgttgacgagtccatcgtaaactgatggatagcatgctccggcaaagtcgtcataggataatgcgaaggtgggatttggcgctccaggaatcagttgcgatggcagtgtcgacgtagggaaggccctcagttgaccgaatccattgtcgatgtcgcagcgggaaattcccagaccaataggggaaacacctccctgggacgaggtcgaaacaggagacgagtatattgaggatgcttcgcaagactgtatctcctctcttcgcggggatgtaattgaggtgcgctgaactaaattccgattcatggtgtagagagaagccgagataaaaaaaagaagaagtgtattcccatcaaataaccaaccggagggctagtctatatcagagtaaataaagggtgatcaatgcaagtatatatagtaaaggctctggagtcaacagcttcgctgttggtgattgacagtggtggcatacatcggtggctgagaggagggtggtggatagggtgtgaattcattggagaagaacttgcgccgcatcgacaccgacaaatgctgaagattcaacgacctgacaccgtaatagacaaggcagatttggagaagaaagggtctgtaattgcggtggaagagaaaatcgggtgggggcattaacggccgggggggtaagggtaatccggacgagatggcagtccaggtctggcatatgtgcactcacagagggctagctccggagagatcaagatagactatgtcatagccacctagggcaaatcaatgcatttgcagcctagtttcggccaattttagagatcgtaataccctgtaagaactactaaggtacataagagatatgacggtgcataacggcggctcttgggtttgtctgggaaaggctaaccatccatttgaccaccgttgggctggtctgcccaaccgagacgtgtcccatgcagggagtagccatacagaaacagcaccagagcccgagtctctggttcggcttggcgaggtgcattggtcgaggggcctgtcgaccaagagcacagccctgagacggtggggaatgtagtattttctgacgaagtccggaatcgggtgatggagttgatcaacaattcatgagcagaactaattatcgtgacctccgtcgtatgcgggccagcccttccgaaccgctcgatccctttggcttcatgtataccatagcgcggaaactccacattgactccaccggtaattgacgcgcccccggacaaactgtagctctctatgagatatccgaattcaacatcatggccgtgatctatttactcgcttcccccctcttgtggatcaaatatgagattgattgaaaaaggaggaccaatcttgaaacgccagggacagggggggggaagccaccccccaaaaaaaggaaaaaggaaaataggagaaaaaaaaaagcgaacgccgaaaaaaaagcaccaagcctgtttcgattaggccgtcatcgatgtggttgttcacaatatcgaacggcttttttggagttgtcaaggtggctctgccactaaaccgaacggacgccgactagcgctcagtccggcgcaggggcgtgcgtggctctaagcgctagggcagtgacccctctacgcgcctttcttttcgaacccgactccacagagccaaatcacagtgcggagccgtattctgtgcccagaaaattgtgtaatggtcacttttgctgggcaatagcctccacttgagttcgtagtcgctctatcgtgtcgatcaggtccgcaagctgcggtacttggccgacctgccccatctctagctcgcgcacggcttgttgatccacactaggtgcttttccagggcctaggcgatttgtttcaactacggaggggtggtgtgggtcccggcaccttgattcagttggttcagaagttccttgaccgcgtgctgacattgggggtagttggatagtggttcgttttgaatgtcgccatttagactcgtacgcccatatcaacgcgacaaacgggaggtgagtggctcgaagcaggacaatgcgtacgcgacgaaccgttccggcagagagaaaaagccgcatggggcggatacagaggaggggaataagattctgccgagtattagcttggaaatattccagaagatacaaagaaagattcaagtttcaacgatcagacgctaactgaccaggggtggcatgaagtatgtcagtcgccgagagttgctgctttctagcacataaatggccaacctgattggcttgtcagtcaaatggaattttccatggggcagtgccaaatttcggaccagcagggatgtttgtatacttactgaaaaagatattcttctcgagcatggcgcatcacctatcacaaaaaaagaaattaatcagccacacaatatacctagtagaccgttttcccttaccccttcgaggctcatgctcatcaaactaatcaaagatgaaagaatgagggtattggtcatcaaggcgaaagtaagcctagaagtcattcctgtcagtatctgcattacattggcaactgcgtggaagttgtagattgccgtgtgctcaaagcgccccaaaaagattcggtcacttgcatatcggaacgtgatcaaaagcacatgcgacttttttcaacgtggcgcaataaaagccaaaaaaaacaagggaacctacatcaagccatagccgaagatgggggagatctaaaaaaaatgttagcgtgcatttcaacttaacacgacagccaaccatttcgccaatattccggaataatgcggtttgagctgcagaacagccgcctggtgcgcagacttacttcagacgcggtgtcctgtcatccaataaattcagccactgtcagtgcacatcctaaagagggaaaggaacgtgggaacccactaatccaagaacactcgatctgcctcaagtggtcagccaaaaattaaaagagcggtcacgacaggggttccttcaccgtacccaaagaacactttcactaacaaatgtgacattgtactgagagacaagcggtcacgggcaagcattgtgaatgtggtcaagaaacctgtaggggattcagcattttattcggctccgacatgcttcactttgtagggcggaatgctttgccacacttaccaatatacagtactaccaccacggggaaaaacctgaagaatgcttttgtctgaaacagattgtcaatcagccttgggtcgcaaagcctgagcgaggggttgggggaaaatcgcaccatctctttcaacaccggtatctattcatatcagtcaatcctgttctaaaatagtgatgcttcatgcaggatccacttactagactgccgaagtatgaattcaagctcacaagcgaacagatcctgctcattccgtgtcagccctgtcgcacaaatgcatagtccatgagtagccatgccttggtacaagaaacagagcctccaaggaaagaatgtcgaatgagagctcaatgatgtcgttgtcgcccttggttagcccgataacccctgtggcgttctcatcagtcgcaccatcaacacagatgacctgccaacgagccgtaaggcagattgggcactcgatgactcacttgttacgacaaatgcgatcccaacaccaattatgctcacgttccagaggctccagaagtccatttggtagaaaatgactccggcatcaatgatcccactcaattcgtcatacgcaaaagcgacgatccacacatacatcactgcctcgaagacgccaacggcatcttgtcgcctctctatcagtactgcgtagtagagaaagaggaaagacatgaagaatgctgcttcaaagattttccgatacagagggactctcaggcgtgaatacggatcagccgttctgatgaaagaatagtcagtatctccgcgagactatcccgtgtcgcgtctaaccttgcgttgaaaatatgaggtttcttggttgaattgaccgtcagagaaccccagaaaacgatttcacccttccaaataccatcgaccactttttgaacaactttttggctcagaaatgtctttgcattggcaatcgtcgcaatctcaagtgcattcaatccaaaaaaccgggaatatctctgggcggcataggtttcctcttggtatgtatcttgtgaagctccagataaccgagtctctgtgaccctcctgctgctaaaaaggcgataaaaagaagaggactttggcaagagaggagtggtctcactttcctcttgtctaccttggatagatgccagggcagggctacctgcttcggaaccaagggtatttgtcgaaccgcgccgcggtattggtagctcttccagcagaaactcaattgtctcgcgctggttcaggtgacacaggaattgccaggcaacaaattcgcaggctgcaccacggctctcattaagtccccagtcatcctcggtggcggtggtgaagtcccatttcaaaatcctggatctgttaatcaaccaatccagttctagcgtcgtctttgtgctgaacttacatcaatgccacaatgatataagggttgtgagtatcatctgccaaagcatggaccagttgtctaagacggtgtccttgggctccgtacagcatttgctcaaacgtgtaggccatatcacccacggccatgctgatgaagctacagggggcttggttaatccagctcgatcaagatcacagacaaggcttacttgaacagtttaggaagaacatcgaatagcggctcatcaatttcgatcaccggaatttccgtatgatccatggttttatccatctggagattgactccagggtttcctttcaataaaattggctgtttgcttttgttctccttttttttggacctagtgtatctccccttagggataaggcagaactgcaggtatcaagaccgaggtattgatggaagatccatgttttttgatcagcggggggttcaattgaccacaaataacaccgtagcaatgagctctgtcagtttaagataaataatcggcaattttaatatgaaacacaaaaattgttagaggaaaagctgacgagttgcaagttgccaacaacatcttgctgaccgccttgtgcacgtgtcgacacgtccagtgacttcatcggcttcagttcgactttccttatcgcatagttctccccaatcatctccatcggatttaatcattctctgactctgaataattgccatcaaatctccaacgggagatgatgggcagtcgacaccatgggacaaggctactccctcacaaccctgtccgcgggttcggcggggatcgatgtgcctgaattatctgacatggtgtatgagaagtcgatgggaggtggcaggtttatgaaaagcattcgcgcaaggcaaccaaatggtctggtgttcatcaagattatcatgaaaccgttcccaaccatggaactggagccatatatcaaaaacattgcaagtatgtttagatccctttttactatttcaagcttctaatgtccatctcaggagaacgaaagttattggcggatgtgccaaatgcgctgagctatcagaggattgttgagactgccacgagtggataccttgtgcgccagtacattcacagctctctctacgatcgaatgaggtaggtctgttgagggtgttactagcgaaagacgcctaacattgatatatagcacacgcccttttctagagcatattgagaaaaagtggattgcctttcagctattgtgtgctcttcgagattgccattcactggatgtctaccatggtgatatcaagactgaaaatgttttagtcacatcttggaactggctatatctttctgatttctcgtcgtctttcaaacccacattcctcccggaggataatccagcagatttctctttcttcttcgacatctccgggaggcgaacctgttacttagcccccgagaggttctctgttgccggggaagagcccagtgaaagcggcgtgaactgggcaatggatattttcagtgctggctgtgtcattgcggagctttttcttgaatcgccgatcttcaacttgagtcaaatgtacaagtatcgcaaaggggaatacagcccagaacacagtcaactagcaaaaatcgatgatccggacattcgagagttgatactgcatatgatccagcttgagccagagtctcggtactcggcggatgaatatctgaatttctggaagggcaaggctttcccggaatacttctacagttttctccaccaatacatgtccctcatgaccgatccttcttcagggcggacagatgtggatgcagaatcagccaaccgaagggaggcagacgagcgcattgagcgaatttacctagacttcgataaagtatcttacttcctcggttctaacacccgtggtgttggtgctttatctagtgtcccagtcactaaattgacaggcaacacccttcctgtgaggcttgatccgccaaagggtgaaagccaactttccgcaccgcagtcacagcccgacgagggtgctctgattttcctaacacttgtggtatccaacttgcgaaatacagcgaaggcatcggctcggatcaaggcctgcgatattcttcttgcatttgcagaaaggctgtccgatgaagctaaattggatcgcattcttccatatatcatggtattactaagtgatcgaaccgatactgtcaaggtcgctgcgatccgcaccttgacccaattactgaaaatggtccaggtggtttctccagtaaatgcctatctgttctccgaatacatatttccacggctccagccgttcgttgctacctccaacagcaagtcaagtgccatggtgcgtgcggcatatgcctcatgcattgcgtctttggcccagtcatccttgaggtttttggacatgatccaagcattgcgttcagatactcgtttggctgcgttgattccggtcggctttgagccccgatggactgaagatgcgacttatcacaatctctatgacgtggcacgggtcgatcttctagaatacttcgaggttcacacaaaaatgctgttgacagacacggatgcatcagttcggcgagcgtttttggggtctgtttctagcctttgtgtttttttcggcaatctcagagcaaatgaggttgttcttagccatttgaatacctacctgaacgatccagactggatcttgaaatgcgcctttttcgaggcagtcatcggtgtggctgcctacgtggggagcctgaatttggagctatacatattgccgctgatggttcagtccatgaccgagcccgaggagtttgttgttgaaagggtaattcgatctctggcagccatggctgacttgggcttattccagcgatcaacaacatgggatctcctacacaccactgttggatttttggggcatccgaacgtctggattcgggaggcagcagtcaagtttgtggttaattccgccaaatttttatcaatagcggatattcattccatcctgacacccattatccggcctttcctcaagatcaaaatcgttgtgatttcggatacccaaatgctcgatgcactcaaacggccaatgtccagaagtgtgtacgaaacggccttgctctgggcttccaaatcagaaagaggtgttttctggaagtctccaagtcgcgatggcatgttcagcttgtctgagcctggatcattcagtccccgggtgggtcaacggaatccttcctttaacatggccgcccaatcaagaaatgacgaggacgagcaatggcttagtcggttgcgaaacgttgggatgggccctgaggatgaattcaagcttctcgcactcaaagactacatttggagggtctcattgcggcaatcgagagaaagtgatgtccattcaaccccacactcgaacgacattgtcagcttgacacaaaatggagtcaagccccagactgtgttctttgataaggaaattaaagatcagccgcgaccaagccactcagacgcgaacgacggcacctccgaggaaccaaggccgagaacaattgcggatgctttacttgacgcttctacaaccattgagcgaatgcccattgctcaacgcaggcacttgcggtcgaaaagccaactttcgaaagagacaagacgttcctcgcttgttcctatcttggacggaaatgatacttcctcattatcatcgtctccagtgatatcatcgcctggcggaggacttgcgtctcgtccattgtcccctccgaacattgataatgatcacatggtttccagtcgccgaccgagccctgggcaagacggctcgttgacaccaaccaacctagacactagaagtctatccgatcgtgtacataaaaagcctagcgcgatgagtttgttgagtcggaactctgccaaagcctacgcagaaaccggtacaagctccgcaaacgcctttggaaaggtagatgcaccgattcacagaggaggcacaccccaaccattgacaccattgcttccacccgagcaaaaactgacgcagaaatatcgtgcacaccattcgtatgggggcaacgaccctgcggtcctgcggctgctagacaacgtctttgaggaaaactacccgacggatctatttgatctagggccatatgtgaaagaacttgacacccggcaaccgattcacggcgccactgatcaagagccaagtaagatctggaaacccgaagggaatctagtcgcgacctttggcgagcacagtgcgccaatcaatcgtgttgtggtagcaccagatcactccttcttcgttactgcgtctgacgatagcacggtgaagatttgggacacaactcgtcttgaaagaaacttgactcctcgatcgcgtcagactcaccgtcatgcaacaggctcgcgcgtgaaggctttgacctttgttgagaatacctacacttttatcagtgcggctaccgatggcagcgttcatgccgttcgagtcgactatcaaaaagtcagtaagacagccgtccgatatggcaagcttcaaatcgttcgcgaatatcagctgcccatagccgaagacgggtcccccgaatacgcggtctgggtggagcacttccgtgacgaagggcagtcgaccttgattattgcgacgaacacttgtcgcattattgcgttggacatgaaaaccatgctcccgatctacacactagaaaatccagttcaccacggcacactgactacattctgttgcgaccgcagacatcactggcttctggtcggcacaacccatgggattctcgatctgtgggatctccgctttcgtgtgcgactgaaggcatggggtcttccaggctggggtgctatcaaccggatccaactacaccccgtcaaggctcgcggacgctgggtctgcgtatccagcagcggcagccacggcaatgaaatcacagtgtgggatatcgagaagttccgctgtcgcgaggtttaccaagccaccccactgggcgtcggcaataatggccccaatggcgctcatcatcctccccgcgccgctcatgtctacccgacggctgtcgtgccgagcgattacgaagcgtggcgggtggatggcgaccggccagaagggatgctgagtcgctttgcaagcactgaaccaggtaccccatcctcgaataatatagccggcgatcgacttggcatcttggcgtttgcggtcggcctcaatgcccctgtcgacgacaaggacaccaacacgaaatgtggatacatcatctccgcaggatgcgaccggaagatccgattctgggatctagctcgaccggatctgtcctccataatcagtgggctagacgctgtctcagatggtaatgccagtggcaagccatactatgagcagtcccagcccggccctagtctcctggttaccaccgagcaccttcccacttcgccgagcactggcagttctcgagatgctaggaagggagccagtccgaggccgccacgcagtaccgttatcagcctgcagcagcaaatgttgctgaagagccatctggatattattcaagatgtgacggtcttgcgtgtgccgtatggtatggttgtgagcgttgaccgggctggtatggtgtatatattttcttagaccttatgttatatgcttccgatgtacgatatggaattgaacagtatctggaattagactccatatatggcatatgctcaattgtattttaggcatgattccgtacatccggcgtctttttatagacatctttcgcgaaagacataggaaatagatagcgaaatatatattaatggctgctactccgcacttcgacccctatcacggataataacgaaatagttaagcccgtgaaggtagctggcccacaggatctatattgtgtaatatcctcatcaagatgtagaacttccatttatgtcccaagctccattttcaagattaagccctcttgccaccggatacctggtacctgggcagggcgtaccggatacttcggcccacgcgggttgcagctgcatgaactaaggtaccgggtacgatgcctattggtactcaaattttgctggggagagctgtgctgtgggtcgttgcgaaacatgaaaacgctggtggagtgggttgtggatcgacaggcaggagaccctaataaggcttagagtaaggagagaggggattctggaaaggctgcggatgggattccaggagatttattattgcacggtgtgaaaggactagggaataagcgctattaattaagcttgcatgagggcggtttatcaattggttctgtttataaattttcaatgtgcgcagtaaactgtagtactacagagtagagagacacgccatcggctaacaaactacaattagaatgctgataaatacaggcataataacctcggacgaataagccgggcgagataaaataggactgcaaatttaccagaagcttggaacaaagagcttgctctataatctcggacaaaagcactccccgagtttatgactatttatacactgggtaatgtaaaacatactatagagtactcctactcgatacagaataagggtgttcgccagtgaccctcatccaatggtccatgcggtcttcccatatgcgatctcgagttctcgccagatcgctaccgttaccacgtacatacatgtacggactactgctccgtacggggccgttccttaccacatggatccagaaccctgcaaacttcaaagtcgtgcgtgaggggctcatccgggaaatgagatctccgctggaactgccagactaagcagctcggtaggcttagtagcttagctttcccgctttcacgggttagcacgagtcagtagagttttggtgaggggaaacgagaaaatgggaaagggagatgtgatgggagatgtacctggatatctggatatatattgtaggttgtgtctgtttcttgtttcctcaagggccaatgttagataatcaacattagaatcattcagggggtgttcccaaccaaggaagatcgaggagatggagacgggagtggagatgggccaggggaactggccaatcatggagattgttcacagctcagacgggtagcttgtcgggatatccatggctcacgatcttgaattcggcctctgatgaaatcggatgaacgcagatgatcgacagaggagggattgaaggaagtggtgaagtggttggagtctcctagctgctcgcaggaactttgcatatatatggttgcactgcatgcgtagataatgcttcacctactcttttcgatgtcctgataggagtgagcatcaatggttccagagggtggacttgggtaggtgttcacctccgaacggccagaatctcatggcccaagataacagtgagattccagtcagaactcttatacggtgggaaggataggtgcatatacttgataactccgagtatcaaagtttgaggtgaaacgaatagatcacaaagataaaacccaacgttaccaacggtgttggatgtatcatttccatctctttgatctaataatatgattatctcgctgacgaaaagaaacgaaaaagaaaagatgaaacacagaaatacacaccctgtaatccaaataccgtacggaattaaagtggagagaaccactttcgtcctagtctataactccctcgattcttcttctcctatttgtccctccccctaaaccctcttctttcttgggttctgtctttcaactgcataagttgtatccatatggcgggtgtgttctcgagtcttgagtattattgaagtttcacccgggcttctcacactctctaaaacatctccccaactttccttggtcttgggtaaaccctcatttcgaactgcactccagcagtgcttcccccccaattcatacagtcctatatctcaaggaatcccaaccccggactctacaactcgacatactcttcgactcgacatactcacccgatacataaatctaccacaatggttcattctctgcgagatcatggatctttggtccggccatccactcgggatcggcccgttacacgcggcgaaggggaaaattcgctggtcgttcctagccgcacatcatcgttgcactcgcgcatcacccaacctatcccgtcctcacttagtatcaagcccgcccagcggacaccgaaaacactcacccatgcgtacatggtatgtggtgtcgggcgcgaaccctcacaatgggtcaaagcgcctgtccccgaccagggcaagattggccacatgaagggagccgtcggtcaattctggctgccggagattctgggaagcagccctcggttagagcaggacaatgagatcgcacgagccctacacgcggccatgcgagcatgcttccctcacgacgtggagatctgcactggcaagagccagcctcactgtgcacaccacgccttcgtattgcaacaagactcttctcacactctgtacggtattgcgctgcgcgtttggtcccgtgccgacgagaaacgcgcggagactatccgcgagctacgcaagaagacggagccggacttctatgataaccccgatgagacctactggattccttactgcttgagcttcctctcccggtatcccctctacgatctgctaggtgactatctccgtggcatgtggatccactggaacaaggccaccaatctgttccacgccgaggaggtctcccgcatcctcagcttccccgcgccacgtctcaatgatttggtccgcattgatatgaaggactatgccctctgctatcagttcccctcgtcgcccaccggcttccaaaactttgccatgtggccattgttcacttgtctgtcgatccctaacattgtcggcgtgattgaggctgcggtctcgcctacccgccgcatcatctttgtcagccactacgcggccatgctgacggtcgctgcggaaaccattcgctactgcgttcgcgtctatgagtggagtggtctgtacgtgcccgtggttcacgcccgccatgtcaaggagctggtccaggagcccggtccctacattttgggtatcactgccgagtgccggactctatttaacgccccgtctgatgccctcgtggtcgacctcgatcgcaactttgtcctcacctccagcccgcctagtgtgctgaaccagggccaacgcaccaagtttatcaaccgcatgacccaatccctgaatggtgatgtctcgccttccggtgtgccccctcacctgcgcactgcctacgctggcggcaagctcattccggctggccagatcatcgtcatgagaggagaggtcgaaagcattgaagaccctcaatggtggaaccaggatgctgtcatgggcgttatggaccatgtatgcgagaagctggtacgttcaatcatctctcaattgtcactaaccacaatcaaactaacagctatttattagggccgcaacaccggcatgaaggctatctttggtggctccgtcaagaagcccctcatgaccaaggtttccatgcgtcacctcaacgagattgtccgtgagcgcaaccagtactctcgggatgccatggaagcttggcaagacttcatcaacctcaagggcagaatggacaccgaactcagcaaggtcactaagcgcaacaacttcttggtcgaggagctcgagacctggaagcagcagttcctcaagttccaggcctttgctgagcagctcaccaaggagacctctgagctcaaggtcaagatcgaaacccacaagcgcgagagccgtcgcctcactgctcttattgatcaacagagggacgatgtggttcgccttactctgcgcttgtccggtactgagaagcagcgggacgatgctctagaggcactggtccttcagcaggagattgccgaagagctcgagcgcgagcgcaagcgcaaccagaaggaaatctctgccctctcgcacgccaattcgactctcacccgcgaacgcgaagatgcccagcgcgttgtcatccacctgcgcagccttatcaatggtcagagccaccacatggagcacatcgtccgctccattagtagcaggtcggagatcgctgaaatagtcgaattaggctacgaggacgcccccgaggagatcaaggataatgtgtcagtcgctgagtcgaagcattccgtcaagtcgactaaggaggtcaatggtcgcagtactccggtaaatgatatgaagcccgagctagagcagcatttgctgaacatcggcaaggaacacaagagccttgcacgtctcagcatcacagatgttgcagaccgctacctgcgcgataagaccgatgccatcgcagatatcatccgcagcatcagcgaccagtgtgccgctgccgtcgaaggcctgcacctggcccaggacgccgaggacgagcaagaagccgagacctcttccaatctccaccagaacgaccgtcgtggctccgaatatgacaacatggagagccggtccatctgcgcccctagcgagatcagcgataccgacaacagctatctccacccggacaaccgccactccagcatccccccgaccccggatctggtccacaaccgctccagcacgtctatgtccatgatcagcaactcgactttccccgagcggtcaagcgggcagtatggccccagcgatttcccgacccggatcgttgaggatgatgatgagcacgctcacgagactgagaacgttgacgaccagctgactgagcgcggcactctgtccaagcagaatagcgaggatctcatgcggcccactgccacacgggtgatttaaattttcgaccagcttttcaggttagatgactgagacgatcttgttttgtttttcccttctcttctctgtcaattccttgttgtccttctgtctggcgaggccttccacccggtttcttttacttcatctctgctgtatcctgaatacgcacatacgctttggttgtctggcgtatatcccatttctcgtcgtgtcgatttcttcattatatccactcgatcatctatgtgtttttcttgtccaataatttatggtcatttttgccttcctgggacttcttattttttttcctctctttgttttttttttttctttttaccccgttcttcccgaggattgtttattcaccatatgtcgtgccgtctgggatggaacggcttgatttgtttgatttgccctcatctccagagagccctccactttgcaccaccatccgcattgcctgcggatgatatttccttttcatctacaatccttgatctggattgatccgatctaccagggtctatatagctccctgtcctccaaaatggattctgtgaatttaacttttcgaaattgcctcattttacatccattgtagccaagccactccaagaaggcttatagaaccacccgtaggattcatatgttaatcatgaaactatatacatcactcaaatgcagacccaatgccaaaacccatttcaagccaacttccctggcacaaaaggatgaccagcactcaacccgccacagaccgcccaagcctgcccattaacataactactctcatcactaccaaggaacagcgccacacgcgcaacctcatcagcaacagcaccccgctgcaacgggttcaactgcccgaccttgcgctccgtgccgcgctcccgcgcccggtcaaacactgtctgcgtcatcccagtctcaatcagcccgggacagatcgcatttatgcgaatacccgttccagagagctgatacgagaccgtctgcgcgatcgacacgacagcagctttcgaagcggagtagtcagttgaaccggcgtttgagcgcagacctgctacagacgctgtgccgatgatcgagccgcctgggtacggcttcgaggctgatgttatcttcattgccggggcggcgtgtttggctgctaggaagacactgtttgtcgcggttagattagattcgtattcgtttgcgtcggggagaatcccgtttgctacccttgtgtatcagggaagagaagagaaggatgtgtatgtaaatgtacgtacccgagggcgtttactcgcatcgtgtttaggaatcccgcactgtcgatctcggtgaacagcttcggttggcctattacgccggcattcgcgaagaagatgtctagtcggccgtatttgctgactgcttcgtcgatgactgctttcacggctttttcgtctgctgcgtcgaaggtccgcacgtgcacttctacttttgggtacagggtctccatctcccgcttgtgcgttgctaggtgcgtgtcgctgaagtcgcagatgtagactgctttggcgccgttgttggcgaattggtgggcgctggcgcggccgatgccattgggagagtttgcgcctggtttttattggtatgcttcttgaatggccttgggaatcaatgtgtgttacttaccggtcacgattactaccttgtccttgacgcgactgtagatttgattagctatgtttgatcttgtaatacatacaatgcgagaagccgactgaggaataatagagctataagctttaaggatacttacggtcctgctgaatcagaggcaacatgacggatcttgggaatatcctcaaacgtgccctcgaagggaatgccttcaacgagctgcttgctcagggcttgaagacgttgctttgctgtatcagacatatttattgaacttggggaatcttagaaggctgataataagaaaaatgacttgaacgtgctacaaggtccgcttcaattgcggtaccctcgtagttataacagcttagcagctttccccactatgtcggttatgcggagagccgaggctccagcagtacagcagtgcatagcgaccaatatggtaacacgatcacgtgtaaatggatataagcattgaatcacatgacactcgtcaggtcacgtcatgtgccgtagggtatcaaagctgtctttgtgggtttccaaacaacgcaaatttgtgctctttgtttcctcatgcttttgttgttctaaaatagggtatctagggttgaaatgcatacctgcccctgaacatccggtcgatctcccttcattccatccgcggatcactacagcaaggatcgccaagcacgcacggcaagaccagccaagtatcaaaagctacataagctacttgattatttgtcttgttagcccgggcaccgtttgcaattcaatgcaattcacccatctccgaaagctctaagagaagccttcatgaagccattaatccacgattttaccgttcacgccattgcccggttgttgagtcatggcggattccgacacccactcccagcggcgttcatcgtcccaagcgtcaagcgcctcgagcagaagtagaaatgctaagatagctcgtgctaaaatgcaaaagcgccactcgggctcctcccacacaacgaccgacttgacctcgttcccctcgctctcgccaccagacaaatctccaatcctcgcccgcggcctttcgaatacgttgttctccgacgaaaacagagcggaatcaaatggaggcgtgactaaccgtgggcggaaggctacgctagaaaatctgacgaccgggctcaaatcaggccgatctgccctcttcgccgattccgtctcgacacacgatatcccaggcgcgctgcatttggctgatgatgcgcacattgagcggctggttgccggaacaggcgccgtgaagatggtgaggcagttcgctcgcgatctggctcaacgggatgctgagatctcggccctccgccaacgcgccgatgcgagggagcgagagttgaagagaatgctccgagatgtgtctgtgtccaaccaagatattgaacgccgtctctatcagttggagaatccgccgggtgatcgtgtctcagacgcagaaagtactcatagcagtgatcatgctggtcaagcctattccagcttgaatggactgatgtctcaagctatggaagacaccgttggctctcggcctcatggtgactccacagaagcccaggccacgattcgcgcccagcgatcagacaatgatcgaggtagcggagtcactgacagcggcaagcgtcaaagctcgattcgcggctggcaggagtacctttttggctcgaccaatacgagccggaaaaccagtcgcgccagtagcgttatgagtgatgtcggtgaagttggagaagaagagactgagcgtcttcgggtgcccagcaatcctgcaatgcgacgcaaagcgcttgatgagcagctatttcaacctccagatggcccggcacgaaacggaccggcgaagcgcattgctagcacgtctgtaaatggcgacgatgtaagcattcattcgcgcaaatcttcacgttctctcggctcttggactgttaagttatttgctggcaatacccagtcgagcaaagatgcaagtgatactgagtctatccacaataaacctcaactcagaaggcctgacggagacaaaagtacttcgtctacattttctgccaattctaagggctcaatgtcggcagtggccgcactgaagaggattaacagcaatgtcagtatcgctaatactggacgatctgccagtgggtcgagcgtccagggcaaaatgaacactcctgccttgcgacgcaatgcagctggcagcgtgtctcagggcgcgacgtcggagactacggatagagcctccacaaatcttggacccgtcgagatggacgccattctgcccatggagtcgaagcctccgacgctgacgcctatttacaacaattcccaatcgggtgagtttctcaccgaccggttcggtttcatctatgatcaacataggaagaagcgccagagagaagcgaatactatcaagagcggtaatcgcagtttgagtataaccgagactctcggtcatcttcgaactgatgcgtcagatcatgaggatgatcccgagatcaccaaacttcggcaggacgcttccgagacctcacgttctctacctgattcaccagatgaccctgaaagtggaggtattgccatccgtcgctggcaggactatctgaagatgccctcccgtcccacagagctattgtccgacacgccctgcgcaggcccgattgtctccttgaccactgcaggagagagtcgctctcatagctcgtctgtttcctacgacaaagacggggcgttggccgtcgggtctagcgcacagccatcggcgtctacatcggctatcacggccgacagccccgaattcgctggcttgtcatcggatcagctcaaagacacagccgccagatttactgtcgcagagatggaacctgtaaaactgttgttggaacagttgactgatctccacgatacactgcaacgtgatcgaaccgtgagatggaacgagttccttcgcaaagtgcgcgctgaacgccgaaaagagggcgaagcggcagccgctgccgccacttccgatcgatctcttgctgccgttgacacgccagaagtctcgctcgccgacggcgaagttgtaggcatcgcaaatctgggtaacaaaggcaaggttggccgagcgaagtggcgagaattccggctgctcgtactcggcggcatcccagttgctcttcgcgccaaaatttggtcggagtgcagcggggcttcggcaatgcgaattcctggctactatgatgaccttgtgcatggcgttggcggttcggaccccgacccctccgtcgtcgcacaaatcgacatggatatacgccgcactcttaccgataatgtcttcttccgcaaagggcctggtgtcggcaagttgaaagaggttctgcttgcatactcgcgccgtaacccagaagtaggctactgtcagggcatgaacctaatcgcagggtctttgctgctcatcatgccgactgccgaggacgcgttttggattctgacctcgatgattgagatcattttgccccaccactactacgaccatggcttgcttgcctcccgtgccgatcaggtagtcttgcgtcagtatatctcagaactacttcccagactctccgcccacttggaggaactgggcattgaactagaggcactcaccttccaatggttcctatctgtcttcacagactgtctctccgcggaggcactgtatcgcgtatgggacgtggttctgtgtctcaatgtgaccagcacaataaacggctccgggccaaatgcctctggtactaaggagagcaacgacaagagtgccaagaacgccgaaaatggtgcctctggcagcggaggtggaagcacattccttttccaagttgctcttgcactgctcaagctcaacgagccacagttgttaacaacctgctcgacgccggcggcactctacacatacatcaaccaccaaatgacaaaccacgcgatcagtatcgacggcctgattcaagccagcgaagcactgcgcaatgtcgtccgccgcgaagatgtcgttgcacgtcgtgctgttgccctgcaagaaatgcgcgaattaagcagcggcgcaagcacctagacacttgcctgatggaatttctcgtcatggcctttcattcatttccccctgcattttcgcgtaacgccgataccacctgagcataaggcaaggagttttggcttttctgtccttttttttttctcattacctggcgctattcccctcattattcctcggttttgtgaaagcacttgttgacatagcccgcgatgttcttgttgcctgtctcatataccatcaacccagcatttgagatacccctggattttacacttgggcggcagcacttttagacctgtttgaatgaaatcgaagtctttttcaatcggcattattcttgtgcattatgaatctttctgcaactctgaagtgtctaacgtggcttactctagggctgtcgatttatcttacaagttccgatcctaagcagaatcgaaatcatacaagggacaagcttattgcttcgtatcaaacgacaaatgctaatttacttgctatgttttgaatcattttttccattttcgctaagaaactaacctccatgcgaaaacagccgatactgcagttaaacgacaaacccaagcaccacgaagggaagcattgaccaaatctttccaactaatccaaccgaaaatcatcaaggttctgctcaaatggccactcagttagcccgtctcaggtctgggcttcctcgtagtcccctcgaagtcagtcaatgccggttcatcggccctctccatataccgaaggatctccaactggtgaagcttgtattcaaatgtctgtgcatcggatacacttctgcagagctctccgtcggtgctgatcggagctgtgattggatacggtgctgttgtcatgaacctggccttcaactgcggcttgaaggtctctctggctacttttattctccgaccgtcttccgcgccgctgtaggcgtcgtatttgatgttggcttggtccatgagacctatgtactgatatcagtattgactatctagcgtttcagaaatctgacaaacgtacgctccatatgcttgatgtaaaggcacattctctgatatgtccgttgcagctcgcgcttcttggtggctgctctgacatcaatgtccagcatccaggtaatcattgcgcaagatagtcctatcaatatctgtcagcttattgtctttgagtgaacccaggtttcatgttaacctaccgtctttgctgtagccatattgttgttcaccctgatatggcgctggaaccttttccatgcgattcacgaaatccggaggcatattttcagcggccatttcaggcgaaaacactgaaagggttggaagatatggaacgaatgttgaagaagggagaattcgttccttttttctatcttgcttcactttctcttctgcggagagtcggagacggccttctctttgttcttccccggtctatctcaaccagtcagtctgacaggaataattttctttgtcgtcacatatttccaaggctctagaaagttaaatagctgggtgttgcggtgaaagccgaaattgggggaataaaacatcttgtagccacattctttgttctcgaaatagatcttgtatacttcaacatgtacgctttgttcaaaatcaaagcctgcttcctctgaaagataggctagaccagataattcaaggagtcaatgtctccatctggattctgttgtcgcactagcgtctatataacaccctttctctcaagtccatcccctttgataacacacatctctctctcgtgtctttgatctatcatctcggcaaaatgaattacgagcgcatgtcagccgaaatccctactctctaccggctatccagggagtccagaggtacatagtcatatctccctatttatttcccttgaaccctccagcccacgagaactaacaactaacaaatcatcagaagccgaccttctcaacggtcttctgggctggatccgcaacgaggcctttggaaaaatagcagaagcctgtgctctctggggtgcaatcgtccaagccaataagcaccttgccaaagtcgatcgtgagacatgtcatgcgctctaccttgttgatcgtcgttgctgattaggttactaatctaggtacgttgcacgctcgtaatattgaacatgagcactttaatctcaaagaagttctgaattccgagttgaagcaggctaaggaaatgatggatgccattccgggtggtagacgtgcaactacggtcactaccgaggaagatttctcgcttgctattaagcggttgaagtttctccgtgaatacaagtagtctgcttggtttctggactcgaaggaggatgtaatttctggcattgatatctcctatgtactctatatttcaatgaataaggctgttgttcaataatataaggtcaggtaccggtggaaacccatttccctcccggtaccagtcaagaagcgggcaggaatcggatacagatttataccattatgttgtatactccgaacttgggtctatagccctaaggagggccagaggagggccagagtcctgcaaggggttggtggaggcggtgaacacaccagccctttgatgaaaggtcaaaggctggtgagcacgctgggcccgggcacgcttttgacttggttcaacaagtgtcgaagtcgcgaatatcagggacggtgtgaaaggtcgaatcggaaagaacagaggtagtcatatcttctttcctcagctcgggctctgatccacccagaactgactgttatctaacaccgtggtcagatccagcgagtccatcgtcggacgcagtcccaaatccatgacatcccgtgcaacggctttgatctgccgcatgatcgactgggaaatggcccaggtgcgagccaatgacttgaagacaccgatcgtcaacgccaggcggtcgcggctggggtctggcatttgaccggctttgacagagcaggtggccagttggacaatggagctcagagtaagcgcacaaataaagaatggggtgtgcttgacaacgggcagacggaaggccgcaaggcgggacaactctcgggcggccttcgcggccttcatggcgtgctcgttgtgcgagaacgcagggacattgaccgggccatggtggccacagattacttccgcggctacggcgggagatgaaagaagatcagagcgcgggaagttgaggtagatggctgcgccgtttaacatcatggttgcctggaacatgatctcatccacgcttccatcgggtcgcaagagctctagcttggactctggcaagtgatggctccaactaccaatacgggcatcaagggcttctacatggtcctgctggccttcggtcatatcctgcatcgccaccacgcgaccgagaatccgtatggcttcaatacgataacagtatgaagagaagtcacgttcttcttccgcgaacacgcgcgcgtcaaactgtgcaatagtcggagacggtggcggtggtagggcgtcatggtagatccgctcctcgcatggaagtgggacctcgagcggtacttggttggtccggtactcgcgctgcacgccaagggcagtcatgagaccctcgattacgaagagctcccaccaggtgcgccgcagagactcggcgcggattggatccccattgcttacaacgatggcaaacgtcgcttgatgcatgccaatctcaaaggctgtatctactgcagcggctagacaaacgccggcctcggcgcgctcattatctgagtgaagcacaatcgccagcagaagcagcgcctgcaccttttccaccgacgcattttgttcttgaaccattgcgacaaccatatgccggtacgtgtcactcgaggcggccggggtgaagtgtgcaccgatgaacttcatcacctgctccaggtatacggggaacatggagcgatataggagccggtggggcggcaggattggatgagcggcgtggaaataattatagtagatatcgagcaggtagccatccccgccgacagcagaggaagaatccggtgtcagcggtccgctagttgggcgaacggatggaaccattggcgtcgagaaaccgtgcagtccaggactagtcgattcggaggagggtaacgataaggtcggcgcataagtgaagccagcctgcgaggcccaatctacggggccatcgagcatgcctaccgggttgggatccatgcgcaaataatccggcgagttagcgcggcgctttttcgacgggcccttatagcctctccgagactttgtatattcgcaatgggatcgggccagttcacatcgactgcagatgggagtcctgccatcgcatttgaggtgtttgtgacgacattgaagacaggccaataatgcgggacccggtttggacccagtaggggcctgcaattcggtcatcgtgaattaacgacgcatataggaaatgtctcaagcgaagtagaattgactggcaccgatggaatagaggggaagagaagagggggagattgaagaagttcgaatgttctcatgttcccggggagtggtaatttcgccatacgctagggggcaggccattctctctttcctaggaagagcttgtgtatattcctagagaggttctacaaggatattccctacagaggtagagaagtacctattgtaataaaaggacaaaagtactaaaaaatataagcgttttactatggaggaaatacattacaccgtaatgcgtatacctccttacattaccatagctctctttcacctacctccgaccttgtcaactacatactcccatctccctctacttgattctcctctcttcgtgtcttcttctcttccgttcaatcctttcaattcatcgaagagagaaaatcccaattcctgcttttgcgaccaccgcaatcacgcacactgtgtagcgtcacttgaactactagccgacgtggcttctccgattatatcgcccacctcttaacgctttgtcgcccgactctcgttctgtctgttgattccatctgcgtcctctgtaacctcctttcacaatgatctccgacaacgacctctaccgcctcgccatcttccttggctcctgcgccatgatgatgattgtcctataccacttcctcgatgtcaattccagtgaggaggaaccagagtctgccgaatcagcaagccagattaaggctaaggatactgtgccagtggtgtccacggacagggtgtcggcttcagggaaggggaattgaatccgatttacgactcgggagagaaccaagataccagtgcctacatcttttgattttacttttaccagcgggtcaggcacaagccaattgtacacgacagtccaatcaattggagagaaaggcagtctttgcaaatctcatggctttattcattacttccattcgagtaatttggaaatgcgtgggtccctatggaattcaccgtctagatttagataaaagcagaacctcttttaaggtgtcatctaggtgcaaatatttcaagccctgttatagcaaggtagcatattattatatgctttcaactttcaaagctaattcacatgcaagccagtcgctatgcgataaaccgagggaaaaaaaaggaaaacaaaggtatcacaaaggtatcacaaaagccgatcggatgcatcaatcattcgcaacaaatgccatctccccacagtgtacattattctgccgcgccggtgtcgacagacgacggtcactccagtccatatcaggcccaatctgctgtttccagtgtcggccagcttcgagtagggcttgcgccttggtcttaatcgtcgatttcccatggaccttgctaaaggcctcgactgcgatctgttccactggcaagatcatggtccctttgcgggcactccggtcacccataactgaagggtgattcgattgaatttccgctagagaatttatccgattagacattttcttcagaccaaaaacatcgtgtgtggatcagccccatggaggagcatcaagcgcaagcaagttgtgattctcaccagttactggtacttttggtccatctccaagcgcccaagccattttggaaatgtgctcgctcgacaaatgcctaaacatatcggctgcagccattggtgtcttattgtcacagtcttcccatttgcacacaagagagtgtgggatgtgaactttcacaatgtgagcccgaactgagtcaaggttgtgaagttctgcaatgcatccctcccacttgcatgggaatatttgataatgcacgggctgttcacgggggatggcaacttcaacattgttcgccacgctcctgggaggtcgtcctggtcttctcttcggtgccatcttgggtgatagagggataacaacttgtggctgcgaaagacaccttgcctctggggatttgacagtccgattagagtctgattggctcttgacagtctgcccttgaggtgtaggctgcgttatagattggggggtcgcttgttttctggccggcggggattttggtggagctgcactctttgtggtcgagggtggtcgctgttgtggtggtggttgcggttgcggttgcggtgacgggggggttgggaatgggacggatttgcgagacgagaaattcggcgacgcaggcacggggtcaattctcggaagtccagaagggaagttggaagaaaatttatgtgaagaataattcgtcggagcttggaaagacaaagtaccccaagggttgaaacctccagaagcgcgcgcgtcgatactttccggcgttgcgacttgacggtttggcggtgtgtcacgcgacggcagcgatgcgtggtcacgtgcaatcgcatgatttggtgtagcacgcggaagtaattgctgatctgcttgcagcgattgaggatgaggtggtcgaagaggtggcatttgtggtggttgaggatgaggaagtggtcgggaatgagtaggaagtggtcgggaatgagtgggaagtggtcgagaatcagtgggaagtggtcgggaatgagtgggaagtggtcgagaatcagtgggaagtggtcgggaatgagtgggaagtggtcgagaatcagtgggaagtggtcgggaatgagtgggaagtggtcgagaatcagtgggaagtggtcgggaatgagtgggaagtggtcgagaatcagtgggaagtggtcgggaatgagtgggaagtggtcgagaatcagtgggaagtggtcgggaatgagtgggaagtggtcgagaatcagtgggaagtggtcgggaatgagtgggaagtggtcgagaatcagtgggaagtggtcgggaatgagtgggaagtggtcgagaatcagtgggaagtggtcgggaatgagtgggaagtggtcgagaatcagtgggaagtggtcgggaatgagtgggaagtggtcgagaatcagtgggaagtggtcgggaatgagtgggaagtggtcgagaatcagtgggaagtggtcgggaatgagtgggaagtggtcgagaatcagtgggaagtggtcgggaatgagtgggaagtggtcgagaatcagtgggaagtggtcgggaatgagtgggaagtggtcgagaatcagtgggaagtggtcgggaatgagtgggaagtggtcgagaatcagtgggaagtggtcgccgagcttgtaccataggaacacgggcccctggtaccgagctacctgcagatgggtcgtttcggggaggcattgtttgacttccgccattgtccaaccgtcgcatcttcgcgggtggcatagaaccatgagaatgatcttgggatggaacccaccgtttttgctgatggggcggtggtatcggcagtgggtgaccccgcgactgcgcattcccagcagtaggctgctgtgccacggccgagtcagaaattgtacctcgtcgaggacctgaagtatgcgaagagttgtgccccgtgtgagaggccacggggggagtgaatgacacagaggctgaggataccactggcgtgctctgtacgttttgtcgggagatcggaggcttctggtttgtctggtttgatgcctgtgtagggggcgctggaggggcaggggcagaggagacaaaagaaacagaaggactgcgagttgagacaggctggaatgttgcggggctgcgaaccctatcaggcgctattggtacggctgactgcacatgatcttgattgcgaaatgagggtaaaggcgaaattgggtttgacctcgcggaattagtagacggaccctcccgagtgctcatggctggtgtaatcgaatggcgggattcaactgtgctgcgtgccgctgagggtttcaatcccttcggcgagtccaaagcggtgtcaatctcagcacccatcgagtaggagcttcgcggcgcattctggtgaggtgatccttgagcattctgggggatcgtggaatggctttcatatgggctttcatatgggctttcatatggactctgcgattctcggggccttgttaccggtacatgtgtcctttgagctgcagctgaaatatatacttgttgcgtgtcctgggcaggggtggtagagtagctctgatacggtcttttatgtgattgggaccgtgccacaggtgtatgtgtcctttgaactggagggatgtccgtagtggaataaggtgatcgctgagtattgtggggtggaattgtagagtgggtgtaagaaggactttgcgatgcggacgttctttgaacttgtgctgccattccttgtgtcatgtaccgctgcatcgagatctggaaattctgatttggggttgccgagtagccctgatacgggcttcgtgatgtggacacagcctgtgccatgggttagctcgttctctgtgtagaggctgtcgatcttatagtctcgcggaccctatgggtgctttgatgggcctctgaggagcttactctggagttaggagatctctgcgggggcccaacaggaatttgggcgcggcgatatgcatcttgacgtgccagagcatccgagtctttttgggacagagcggagggatttggccgttgagttatattgcgagagcgagctgtttggtattcagaggggccataaggagcattgttggattgaatattgctatttcgttggtgtttatttcctccatactgttcacccgaggcttgggagtacgcctgagacggattcgaggcatgattaggataggttgacctcattaacatatatgtcttctgtgcctgctggtgcataacggccgctttagccacctcctccgcatcgtgaaatgccggatgtgtttcatgagcctcaatgtcagaactggggtcgtggccggtttgagtatcggctggaagaaaatgctgaagccaatcatatccgtccatgcctccgtgaaccatttcaaattgtaccgaggctatatagcagctataagcgcatagctaagatgttgtaggaccgagcaaagagaaggcttgattagattccgttgcgcatggagggttggatcgtggccggacagggggaaagcgggtataacagatagactcaaaaatactagcaaacaaaaaatggcaaactgaagaatcaaggaaggaaacttcccacggtgctgcaaaagcgcggccaaagagctctggcgatgtcgagccacattgagaagcgcgtcggaggtggatcccgctatcagccaatcataccacgggcttttgtggccttagaggtcaggtgtctagtcgcaagccctgagatggcttagcgggaaattagtaagcacacaatcccggggctccaacttggaatattcggctacaccagaaaagatcctctcttcgacccaacgccaacgacacccgttcatttcccactcacgacctttaagatggctgtccgaacccacggtgcgtactctctcgcatctcgccttgcgccgatttgatttaccactgctcgaaacccctatcaatacgaattttcgccaatcttcaactttcaatactgatggtgtctccaggtatcgcctcttcgcggagcaagtctcgcaaggcacacttccaggccccctccagcgagcgccgtgtcatcctcagcgcccccgtctccaaggaactcaaggagaagtacggagtatgtaccacatgaacctccaaatcgaatctgggtctgttcgggtcgagtttttggaattggaaactacggacgatacaggcgccagaatggttcaatacgcgacgattctaaccagtgttctgtgatagatccgctccattcccatccgcaaggacgacgaagtcggtgagtttcattgatacaacctgggaataatctcgagatctcgaaactgactactatatgcagttgttgccagaggttcccagaagggacgtgagggaaagattaccaacgtctaccgtctcaagttctccatcttcgtcgagaaggtacgattcgaattcacatcacgcttattgcggatacttactgcggttttagatcgttcgcgacaagagcaacggccagagcgttcccattcccctccacccctccaaggttgtcatcaccaagctgcacctcgacaaggaccgtgagcagatcattgagcgcatcgccaagggtcgtgaggctgtcaagagcaagtcgacttaagggatttcttacgtgtggggtataggttcatgttgcaatggcggttgacggcgcgggttcacttgaaggactctgagaaacggagtttccagcctgctatgatcagggtaaagtttctgaaaccaggtgcattgcgatgaatgaaaaatgaacaaaaaatttcctttttcttctatccggagtcggtgctcgcaaggcaattcactttgcgcagccggcgttcttcttccttcgtctcccgcgcacataggaacctccgtcgaatgctacagctcaatcttcaggtcattacgttccttgtccagtttgcagctcgtccgttctagcatgcttttccttgctcgattttgtagagacctgtctccactcgcttccatctcttttcctctctattggaaaccagaggtgtcgcctgatatatctcctcgtcaatcccgtccttttaggacggatcccatggttgaagaggtaaacacttggcgtaaactattaacagggctactgggaagctggtagcctctgtctcacctgcagactcactctgatgccttcgggcaaggacgaagtgggtttgaaggtgaggtacatatcctactccaagttggggtatatgctgtaaactgtagggatcatatcttcggtgcgggggatattggatagtggatattttcaatcgatcagttgatttacttgtctcaatgttttctcttcaattttctaacatttgtcttcgttacttatcatttggtatctatgtacctatggataggaaccccgcatggatggtatgatgctggctgcatatcgtcaagagcggcagattgcagtggctatggaagagatcaacgagatttcgatgcgcccactgttaggagctttactgtctaaccatacgcactcaaagatggtcgtttctttctaaaactcggtgaaaaatttgcttatttgacttatggatacatatcggggggatccgatgtatatattgtcgccttgctcagtagaatcagtggcaaaatcccaactagacaaccaatcaatcagcctatgaaatctttataccttattgcataaacgttcacttctttagaaacaaacaagaaattcatcatttacaatagcccaagtcttgacaagaggagacatctgaaagttgagacataccagacctactggctagacataagtcaccactcaagtccttaaaaaatatatgcaaacttcaatatcataatgaatacaaatcagatagctgtaatatacaagctcgagtaagaaaataatccaagtagtaaaaacggagcaaactcagaaaagcagaaaagcagatgaccatcgcatcgtggtctcatgagaaagtcgaaacccgaagcaaccccagagactggatatttgaaaaaaaaagcacgctcgctgaaatattcgactagccaccctagagtgcgctagtgtccaacacacttcccccatgcaggtagtccacaccccataccaatgaacagatacagcaagaagataatgacgatcacaatcataatcatcaacttggtattcttccaccacatccgcctccgcagtccccggctacgaatccggaagtcatgcgcacttccgccaagccgatccgtcttgtcaaccagcagatcaatgcgctcgccgcgctccaggacccgctcgatattctcggtcataatatcgcggacgctatcgatttcgcgccgggcggacgcgagggagtctgctggcggggcggtgttgtaggattggaggagagagcgcagctcgttgttgaaggcagcgcagccgtaggcgggcagtgtagcgaagtcggttgtggacgggttgtaggtggttaagaacttgcgcttcatttctagcaggtaggcgaatgggatgcggcggccttgctctgccgatgcaactaccaggaagctcaggggagcgtgtgagttgggctccgcaatgttgccatcgccggattggttgccggttggcgagtcggcaatgtaatggacgaacagtcgttcatgggtgaaggtgagcttttgtggcttgtcgtgcgtgatctttgggaggatgattgaggctagtgacgaggcggcactcgttgaactacccggcgaggagtgctcggccagaatggtagtgcgataggcgatgcatgagctgaagttgattacattgttagtccgaaaatagtttctttgactgctcaaatgtcagacagcaagacttactagagcaaagagctcgtcttggaggatgaggccatagtgatatgatgtcagtgccgtgacctcaaatatataggacccgtagtagaaaagaggagtaattggaagcgatggaagagctacagtttccaagcgcttgtgatactcagatataggacctaaatcgtttgcaaggtccggtggcagttcgcccgcctgcctacgtacgtgcccaggtgcgcaaagacgctgagtcagcggcagcggaccttaacccggaccggttatagctctggagttgttggtgtcttttatatgggatgagattattagatgtcaggcagagttgttcatctaatacatttaggcttccaactgatagtcacaaccgaagtgttttgtatacaatcttctattggtcttattgcagtagaattccaagcaaagaggatcttcacttcctcatgtttaaagtcatcttctgtcagtgatgtatacgctctgaaggaggctatggataatacacactggacaagacttaaaataaatgggatcattggctcgcttatggtagatggggtgattataagctggacacttcgtacttctagagttgctattttgatactactagtacctacattcacgaagtacggagtacctatatcaatcatctgtcatctatagtagagatatacagagcacaccgtaggcgatcttgtgcattatcgggtacttatttgctttagatctcgatgctttctacacacatatcactaatacaagaatagccccaaagaattgatgtagaatttacatacaaggcatacagttctatgtaaatgcaagtatctaggccttgctcatgttccacactgaatagtacaccaagatattttattttaaaaagtatggaagaataaggagaacaagaaggagaagagagagctgtctaagatgacctcgggaagatccgaagtggcggacaccattaatcaccatgtggtcatggccatgtcattatcctttttcgatatatatccagcgcggaattgattctcctgttaagcaattgaatctcccgaaacaacattactatccaaaacaacctcatttataacctcaatcatgattagcatgtcagaagccttctatcaaggtcggagaccgatgaagtcagtatctgccctgggagtagatgttctatactgacacagaatataatcagaggtcgcagcatcgccttgctaagtgtctttggcgtcattggtggtacagctttaatgttccgcttcctagctccccagccaggcacgctcaatacgagcaaagaggtagcgacgtaccggggtggcgagtctgaacaaacagatcaaggcgataaatttggacgcactgcccacccgcctcgaaaggaatatccagtgtccaggccaaagttttaaggggaaatggtgccgggaagcatgaagcgtactaggaaataaggattggattggctagaaaggttggaatattgaagatttcatgtatggattgatgaatattgaacgtcgaagccgttatgtaccccgaatgagatggtatctggtatccgcaaatcaaaaagccaacgcgccaggtcaaaagtagatatctagaaagcaaaagatcctccgaatcaatttacaggaatttttacacggtgctagcaccaaaggatagaatgtactgaatagttaagaagacggcagggtatcatcacccggctgatttcctgtgaatgggtcttcaccactagcagcccggcttgcaggtgaagcgacactcttcttcttcgagtctttcttgtcacgcttcttcttctcacgcgtagccccccgggactcgtccggtcggcttgggctgcggctagactcgctgcggcgaagatctttgaattctttaatcacctcacggaacccttcttcgatgttgttcatgcgagctagaaccaacttgctgagcatgtcttgggtttgggttgggggttcacgacgaacgggtggggcaaatcctagttgggtctggaaacttgacgggagggcaccggaaaagccactcgccacggccttgttgtcgcctagatcagatcccagatcgtagagaagggatgatcgaggtcgggtgcccgtggaccgattagttaggtaatctatatcgggaacggacatatgtagtccaattggagggttccgagcacgagatatgtcgtgacgcttcatggtaccctgatctaacgaggtggaggcaaaagggggtgattctccatcggaggaatccgtatccggccgtgtaggtgtgacccggccttcggtctcttcatctagagatccaactggattgtacaacatggtgaccccagaagcattccgtgtatgtctgatgcgacgtgtagggctgttgcggcgcgacatcattcttgcggtagatggacgagagctgtagaacttgggcgacggcctctccgcaccttcaaccgagtcagctgtctcacccgtggaccctagagccgattgcttgttatcatttgggtcaccatcgttgctggtaagttcgtcatcaccctccatgtctgtatgaagggagagttgtcgtttctgagtgggcgagatagagggtcttgtgcgccgagaccggatgactgggctggctgcgcagcttgttcggtcctcaggattcgaagcaactgatcgggtggtttcggtgaaatctcgaggtgggttagataatctagcgcggaatggaaatttgaatcgttgtcggtgcatgccatgacggtccgcaactagcgagtccacatcatcgggtccattagctggtccagagccgatctcctgcatccagtctttgatgacattattggtctggcgttcatgcacagtgcttggtgggcctcgcattcgatcgccacgatatgggcgtcgaaacacttcctccaacgcccgatccttctggtatgttgccacagatggctcccgtctgagaaccgatgcactggtgctgaaaccacggaatcgacgtggctgttggatatgagctggtgtttcattttgtgaagtaggttcaattagatccatcggctggacgactcgagaactgaggattgtctcctcatagaggcaaattgtaaataatatgggtaagtgggttatcttgataatggtccgattgagccgaatgaagtcacggaacggcatcagggatcggaatggtgtcactagccaggcaatgatgtttgttggtgccacataagagaacaaagcatcagacttgaccatcgagatggtattgacagcgaacaagaactgatgttcttcatttgcattctggacaattctcatgaaagaattggttagaaccgtgatcaagatagtgacgacgacgaaatgacagatgaacaggaaaaccgtcagaattgttctccctaaaaagttgtattcatcccacattgcccatgcggttggcgtaaatcccatcagcatctggaacaaaccataagccaccactttgggggacttgttgtctccaaagtacaagaaagagacaaaaaagccagagcaagaaatgacgatgagtacgaagacggcaatcaggtctgaggccattattcggaaagcaatgaggagttgggagaagtagcgataatgatccaatatagaaaacaacctcgggaatagcaagggagctgtagctgtaagaacatcgaactgagatggattagcatgtgccgataaaagtaccctggtaaacataaaaacgtacggcttgatcggcgatatattcacttctagggtaggtcaggaatgtgccgtatatcctcaagcaataatatgcgaagagcaatagcaaaatcccgacgtcgaacagattccagaagctcatcagataaagactaaagccttgctcattgaacccaacaacttcatcaagcatgaatccggcactccaaaaccagaataagatctcaagagatgtgatcctgcggctgcgctgttccaaaaccgccaggaacagtcccaagagtactgcaaaggatagggtggaaagaaactgccgatagcgcggcactctcagccgcgataatttgaacaaagatgcgtcccgggggttgtagatcgtcactgaccgccgaagtatcttattgctggactcggtcgtattatcatcattgggatccattgttgccccataatccaggtttccaccttggttcatgctcatagagcgatggagactgtcggcggccgagtggaagacaaccgtccccgcccagatagcctccaattgttgcacgacgacaggatgggccaagaatcgcttggcctgcgcgcggatagcaacctctaagcatgagacacgggccgcaaccacccgtttccgatgagggccagtgactaatattgtggattgatcctggccctgaagtggatagaactcgtaggacagcgcatcgatcaattcgcgggtcgagtattcccgcaatagctttatcgccaacagttcactgaccattgcccgtgtctgatttgccccgctattccccggacttaggtgtatttctctctcgaattgcagacagttggccatcaatgcatagagggtcgcgcgcgaaaagtgggccgacatgattttctgcaggatcggcttgatcaggaactgggagacctgcggcgagcgtagttggtcccatgtgagggtggtttcgcagcgtgaagcgatcaaaggacgaatggcgtgggtgatgttgtaaacaggcagcgcatctaatcatgttggtcaattgtccgtatacaccgtacctcaaggatctccgtacccaaatgcgacgcagagaacataggcaatagaggtgtagactcgagtggtccgtcctcttcctcttccccttcctcccagtcctggtccatatcttcctcatcgatttcgtgaagctctggcgcatcatcgctgctttcatcggctcgagggacgcgtcgcgagttgttgtgtgtggagcgaaaccacggggagggggttgagaatggggactgctcgacctgcccgcgctggcgctttggacgcagcagcgaggcgaacatggcgaggaaacttcaaggtctaaatcagcataaccgaagttgtttgttgggaggttgtaggatgctagagcattccggaaaagagcgcgcgagaaaactaaagagggaaaagggcaggagaccaaagtaagaaggtgaaggtttgctcaagcccaggtgaaagcggaactaactccaaagatatcgtatgtaccttttggtgttagagggaaatctaagttcttactatggccaaccccccacgtcattgtgctgataaccccggttcactccttgtaagcttatttgttcttcggtgtttaccctttcatacatagatcttagatcttagatctttaaatgtttaaatgtttaaatgtttaatctttggactgtccaatattatatcagccttcagttttaagggagatcgcttattatcttggccgtaatcttgattccacagtatgcagaggatgtacatccagagcctgcatatacagatgcaacagaattcgacaggtcagaaatactcgccacacatgtaacagaagggatgaccggcattgtactacacatttttgagacgagacagcaagatgtcttatatatatatctaaggtttttctgctccgtatactccgtaaacatgtgaatacccgactgccccaatatacgatatcgttatcggcccactgcccgtgcattgcatcatatgcagtaacgcgtgcatgtagatagagaatcactaatcccccaaacttctcaattgaaccgtataccataaaaaaagagtactacaatagcacaatgctctctatagaaaccagagcaacggaaaatctctgcggtgaaacggattgtccgaaagcagaaaaagagtggggctagaaaaagctttttgcatgaaaatattttctgccgaacttgctttttctctcttcctcctccacagctggttgcagcaaacagtttcttgtctttccttctttatatatctatactcccttctgcggtcctttctttccttgcaagccaaacaaacaaaatttcacagatgaactagagtgacctgctcgcacgagatcgcactagatcgtccccgagaggacttgttccctcacaccaattacgatgtctcccaattcccttgaggatccaactctgcctaccagcccacacctgggtagtgtagtcggatacccagaggcccagtccaacatggattccgtcagtggagtgatcaagccggcctccatcccaattcggggtggctcagaccggttggtcgccctcgaactcgcagatggtactgtctaccaaggttacaactttggtgctgaaaagagtgcctcgggtgaattggtcttccagactggtatggtcggttatcccgagtctatcaccgacccttcataccgtggccagatcctggtcatcactttcccgctcgtgggtaactacggtgtcccttcgcacgatgagatgtgtgagctcctgaaggacttgcccaagcacttcgagtccagtcagattcacatttcggccttggtggtggcatcctacgccggtgaggattactcgcacttcttggccaagtcctccctgggcgattggctcaagtccgagggcattccggctatgcacggtgtcgacactcgtgctttgactaagcgccttcgtgagaccggtagcatgctgggtcgcatgttgctgcaaaagtctggctcccctcctgatgttgctgctactagcggtgtcgactggaagtcacacttcgaggagactgaatgggtggatcccaacacaaagaacctcgtcgctgagggtgagtgatctaccaagcttctacatgaaaaagtaaaggttttctgacatcattttttattcttacagtctcgattcgcgaacctcgcctattcacaccccccgccaatgtcgccctcaaacacccctcgggccgtggagtccgcgtcctttgcttggatgtcggtatgaagtacaaccagctgcgttgtttgcttgcccgcggtgtcgaggttctggttgtgccatgggactatgatttccccacccttgctggaaaggacttcgacggtctcttcgtgtccaacggtcctggtgatcccgcgacccttactgttaccattaagaacctgaccaagatgttcgaggatgctcgtactcccgtcttcggtatctgtctgggtcaccagttgattgctcgtgctgtcggcgctcagactaccaagatgaagttcggtaaccgtggtcacaacatcccctgcacaagcatgctctctggcaagtgccacattacttcccagaaccatggttttgctgtggatgccagcagccttcataacggatgggaagagctgttcgtcaacgccaatgacggcagcaacgagggtattcgtcacaccagccgtcccttcttcagtgttcaattccatcccgagagcacacccggcccccgggataccgagtacctgtttgatgtgttcatcaacaccatccagtctaccattgactcccccgaggctctcaacatgcctgtctccttccccggtggcaccaaggccgataatctcctggccgcccccaaagtctcggtcaagaaggttctggttcttggctccggtggtcttagcattggtcaggctggagagttcgattactctggcagtcaagccatcaaggccttgaaggaagagggtatctacaccattttgatcaaccccaatattgccaccattcagacctccaagggtctggctgacaaggtttacttcctgcccgtcaacgccgagttcgtccgcaaggtgatcaagcacgagcgtcctgatgccatctacgtcactttcggtggccagactgccctttccgtgggtatccagcttaaggacgagttcgaagaactcggcgtcaaggtcctcggtacccctattgatactatcatcactactgaggatcgtgagctgtttgctcgcagcatggattccatcaacgagaagtgcgccaagtctgcctctgcttccaccctcgaggagtccctgcgtgtggttgaggacattggtttccccgtcattgttcgtgccgcctacgctcttggtggacttggcagtggtttcgcggaggacatggatcagctgaaggagctctgcactaaggctttggccgtcagcccccaggtgctgattgagcgcagtatgaagggctggaaggagattgaatacgaggttgttcgtgatgcccaggacaactgcatcactgtctgcaacatggagaacttcgatccccttggtattcacactggtgactccattgtcgttgctccttcccagaccctttcagacgaagactacaacatgctacgaaccaccgcagtcaacgtcattcgtcacctcggtgttgtcggtgaatgtaacattcagtatgccctcaaccccttctcgagggagtactgtatcattgaagtcaacgctcgtctgtctcggtcctccgccctggcctctaaggctaccggataccctcttgctttcattgctgccaagttgggtcttggtatccccctgaatgagattaagaattcggtcacccagtccacttgcgcctgcttcgagccatcgctcgactactgcgtggttaagattcctcgttgggatctgaagaagtttacccgtgtgtctactcagcttggttcttccatgaagagtgtcggtgaagttatgagcattggccgaaccttcgaggaagctattcagaaggctattcgctcggttgatttccacaacgttggtttcaatgagtccgatgccctcatgtccatcaagggcgagctccagactccctccgaccagcgtctgtttgccattgccaatgccatggccgccggttacactgttgatgacatctggaaactcaccaacattgacaagtggttcctcagccgactcaagggcctcagcgacttcggcaagtccatgtccaccttcaatgctaccactgtgcctgtgcctatgatccgacaggccaagcagcttggtttctccgatcgtcagctcgccaacttcttggactccaacgagcttgctgtgcgccgcatgcgtgttgaggctggtatcacacctatcgtcaagcagattgatactgttgccgccgaattcccagccgtgaccaactacctatacctcacctataatgcttctcagcatgacctgacgttcgacgatcacggtatcatggttctgggttctggtgtctaccgtatcggttcctctgtcgaattcgattggtgttccgtgcgtaccattcgtacgctccgcgagcagggctacaagactatcatggtcaactacaacccggagaccgttagtaccgattacgatgaggccgaccgcctttacttcgagaacatcaacctggagactgttctggacatttaccagctggagacttccagcggtgtgatcatgtccatgggtggtcagaccccgaacaacatcgctctgcctcttcaccgcctcaatgtcaacatcctgggtacttcccccgagatgattgatggtgctgagaaccgttacaagttctcccgcatgttggatcgtatcgaagttgatcagcccgcttggaaggagctgactagcattgacgaggcccgcgatttctgtgacaaggtcggctaccccgtgctggtccgtccttcatacgtgctctctggtgctgccatgaacactgtgtattccgagcacgatctggccagctatttgaaccaggctgtcgatgtttcgcgtgagcaccctgtggttatcactaagtatatcgaaaacgccaaggagattgagatggacgctgttgcccgtaacggtgttatggttggccacttcatctccgagcacgttgaaaatgctggtgttcactctggtgacgctactctgatcctacctccccaggatttgagcccggagaccgtgcgtcgcattgaggaggctacccggaagatcggtaatgctctgaacgttactggcccttacaacattcagttcattgccaaggataatgacatcaaggtcattgagtgtaacgttcgtgcctcgcgatcgttccccttcgtgtccaaggtcatgggtgttgacctcatcgagatggccaccaaggccatgatgggaattccattccaggagtacccccctgtgtcaattcctaaggactacgtcggtgttaaggtcccccagttctcgttctcacgtctgtccggtgccgaccccgtcctgggtgtcgagatggcctctactggtgaggttgcctcgttcggtcgtgacaagtacgaggcctacctgaaggctctgttgtccactggattccgtcttccccgccgcaacattctgttctccattggttcctacaaggagaagcttgagatgctaccctcgatcaagaagctccacaatcttgattacaacctgttcgccactgctggtaccgctgatttccttaaggagaacggcgtgcctgtcaagtaccttgagcatcttccggaccacgaggaggagcagatgaagtctgagtactctctcacccagcacttgtccaacaacctcatcgatctgtacatcaacttgccgtccaacaaccgcttccgccgccctgccaactacatgtccaagggttaccgtactcgtcgtatggctgttgactaccagactcctctggtcaccaacgtgaagaatgcgaagatcttgatcgaggctattgctcgccacttccctctgaacatcatccccgccgactaccagactagccaccgcactgtggtcctccccggtttgatcaatattgctgcgttcgtcccgaaccttgtctccgttggttccaaggacttcgaagctgtttccaaggcttcgatttcaggtggtttcagcatgatccgtgtgatgcctgtcggtgttcacagctcggtcacatcggcccgcgacctcaagattgtccagcagaacgctctgggcaagtcgctctgcgacttcaacatctctgttgctgccactgccaccaactcagaccagatcatccagatgactggtgaggttggctctctcttcgtacccttcaaccacttgtcgggtaacatcaacaaggtggccactgtcaccaaccacttcagctcctggccctcaagcaaacccctgatcacggatgccaagagcaatgatctcgcctcgattctgttgttggccagcctccacagccgtaacattcacgtcatgagtgttacctccaaggaggatatcagccttattgctctgagcaaggagaagggcctgaaggtgacctgcgatgttgctatctactgccttttcctttcccgcgaggatttcccgacctgcagcttcctgcccaccgccgaggaccagcaggctctatgggaccatatgagcaccatcgatatcttctctattggcagcattcccttccagcttgctggcaagcaggctactcccgagtccggcatcgctgaggctattcctctgctgttcaccgctgtcgccgagggccgcctgaccattgaggacatcaccgctcgtctctatgagaaccccaagaagatcttcgagctgcacgaccaggccgatagctcgctcgaggtcgaggttgaccgcccctacgttttccagaatccccaagcctggtctccgttcaacggcaagacgttgcgtggctccgttcagcgtgttgttttccagggcaagaccacctgcctcgatggcgagatcaccaaggatgccatcaagggtaccgacatgtccactcaccgtatcgtccctacctcgcctgtgctgaagcccgtgacccccatggttcgcccggagagttcccttgacaaacacgggtctatcggtggtactcctggccgccgcttccgggccctgtccagcgctgtcggcgaacttggtcctcctctttacgtcgcctcctcgcaggtctcaccctcgctggctgatatgctctcccgatctgctttccggggaaagcacatcctgtctgtgaaccagttctctcgcgccgacttgcacctgctgttcaccgtcgctcaggagatgcgtcttggagtccagcgccacggtgttcttgacctcctgaagggccgtgttttgaccaccctcttctacgagccctccacgcgcacctcggcctctttcgacgccgccatgcagcgcctcggtggacgtaccattgccatctccactcagcactcttctacccagaagggtgagtctctccaggacaccatccgcactctcggctgctacggtgacgctgttgttctgcgccaccccgactcgaccagcaccgagatcgcggccaaatactcccaggtccccgtcatcaacggtggcaacggtgcccttgagcaccccacccaggccttcttagacttgttcaccatccgcgaggagttgggcactgtcaccgggttgaccatcaccttcactggtgatctcaagtacggccgccccgtgcactccctcatcaagctgctccagttctacgatgtccgcatccagcttgttgcccccaaggctctcgctctccccgacgatgtccgccagcagatcgttgcttccggccagttggtcctcgagtctgaggagctcactcctgagattgtcgccagctccgacatactgtactccactcgtgtgcagaaggagcgcttcgtcgacattcttgagtacgagcgtctcaagaacacctttatcatcgacaacgctctgctcaagcacgccaagagccacatggttgtcatgcatcccctccctcgcaatgccgagatctctgaggaagtcgacttcgaccagcgggctgcttacttccgccaggtatgtttctgaatttcccttgctgtctctgaacaatgaactaattgcattatagatgcgctacggcctctactgccgcatggctctccttgctctcgtcttggcgccatgaatatgatactcttttgccattctaattatgtgggaaaggaggatcccaaaagcgccatggatttacgtgagacgttttgttttccttgttgtttgaaaagttatgtttttcgatactccgtaatcagcgtgataaatcgctgtatagattagatgaatctccgtttcatttgacggtcccgttcagtgtatgtctctatttctatgtgtgtatgttatgtgatatgtgtcatatgtgtgttatgcgttatgtgtgttgtgtgtgtgtcgtgttttcctttttggggtcatttgggattctttcggggtcatttcggggatttcggggattcttttgggacttggcgtcttttttgcattttatatacccactctgacaatatacttcattaattcatctgagcccgaactttttttcaagtttggaacacccagcgaggatccttatccccttggaactctccctccgcatcacccacgtctcccatcaacgggctcagtccctggacttccctcagacgctccttttcagcattttcccgtcggagaacgtgccataggatcccaacaaccacaatgttggcaactagatatcccaaggcaaatccatgacccaggaagtaccgcggggcactctcagcgcggtaaagctgtgttccaaggaccgcacccagattcccaattgagatctgcatggcgttggcaatgcaacgcttagtctggccggacacattattggcgggccaggacagcacaatagccacagctgggtaaatgcctgccgcagcgaagatagttccaacgtaagacacgccagcccggtgctgtgacagcaggagaatgtatccgatacatccaacggcagatgatcccatgataaacggggcgcgactgcgagtcttctcagaagcaatcgcaacaccaatagttgagaagaacgacactgcgtacggtggaacggacagtagctgcgcctttgcggctgagtatccgagttctttgatgatggtcggaaggaaaagtgataaagtatacagtggcaaggacattgtgtggaagccaagtccatatagccagactttggggtctttgaaggcatcctgtactgccgaccaggtgaattcctcatcccgagtggcatcgctgtcgttcttcagacgcaattggatgaactcccgttcttcttttgatagaaactcggctgttgatgggtagttgtatacccagaaataggcgatgatcgaagcaacaatggtcaacagtccttcctaaattgattgtcagctatgatagtgcatggtatagttgatcgggacgcaccaagatgaaaatccacctccaaccattcaagtttcctacacctttcatgtgagagattgcctagaaacccattagcttggttatctaccaggagaagaaaaccaacccaagccaggataccaccaaaggcacctgccatcgaggcagagctgaaaaacagagccacgcgataatgttgctcgttccgcttataccacatggacagataaaacaccacaccggggaacaatccgctctctgcaacacccaggaagaatcgcgaagacagatatccagagtaattctgtactactcctagaagtgtagctactactccccagaccagggtgagagtcggaagccatattctcggggtggttttcttcaagacgatctgaatgtagctgttagtctttgtacaggacatttatattcataggcgttactcacattgcaaggaatctcaaaaataacatagccgataaagtacagagtcaggcctgtaaggtactggtctcctgctatattccagttaatcctcggatcaatatgaagacacacaaaacgtacacattttgatgtcggtcgtcattccttctagacgggcatttcccacattgctgcgatccaaaaaggagagcaaatagagtaatgtgaggggtggcaaaagacgatagtccaatttccgtaacaaggccttctcgttgatgcccttgatacttggagaatcgctggcgtccatctcggcgccagtgcgcacatcatccttttctgaagtagccatagtaactcacgggggactcagtcttgaattgaggcttggattaaggctatcatatatggagagagggggataggagaaatatataacatttagcacaccatccattaccccgccaataaatcattcttccatagagagagcgaataaggtcaccgatataggtgatatcaaaagagaatgagcaacattggggctggaatgacgagagctgattccatgtgaagatcggcaagatgcatgaatagcgtattctacgagtcctatgttacaccgtgaagtatagaggtcgtataagcggccatctgttcttattcttacttactacaaatccatggaaatttctcaggaggttgatatgacgatcagagtacttcatactgtaagaaattacttcaaagaaggcggatgaaatgtactatattgtttagttggatctttgtatttctcatgtctatgctcagtctatagtggtactcccagaatgtatgttcgctaattgacacacctggccatgtcttacccttcatccgtcagctcatgccttatccggccagtacttctgtacaatgaccttcttattgaccttgcccatggcattgcgctcgattccatccacaaccttcaaaacagttgggattttataaggagccatctcgttcttgagcgcagcgcgtagagtaggaagatccagcggtgtagtctatgtcactgttagttatgcaaaaagaacagttgcccttcatggactcaacgaaaacgtaccccttctcggaacttgacaactgcagcaactcgttgcccccattcctggtcggccaatccgactatagcaacttcttgaatcgcatgaatggccagcatcttgcgctcaacttccaacgccgaaatcttatatccaccggatttgattaagtcgacagaagcacggccttgaatgaagtatgcgccgcttgaatcgcgtttagcgacatcgccggtcttgaaccatccatccactgtgaattccgaggccgtcgcttccggcttccgccagtattcgtagaagacattaccgcccttgatctcgatcatgccgtcctcatccacttcgtccacaatacgaccggtttctttttcggtcagtcgcacctcgacaccaggcaatggccatcccacactgccatcgattcgcttttcaatctccagcccacagctgatcgccatgccaatctcggtcattccatatcgctccaatagaacctgaccagtgatctccgcgaatttttctttgatgggggtgggtagggccgcagatccactgacgaccagtcgtagagcacgagctccagcccgcgcggcatcttcttgttccgtgccgcggatatgagcatcgaagtagtcattcagacgggagtaaatggtcggcacagccatgaacaaggttgaggagccagcgtcctgccaccgctcccagatcaccttcggatcgaattttggatgcatctccactgtggtaccactcaggaaactggcagccaggccattgacgatgccgtggacgtggtggagtggcagcacgtgaatgagacggtctgagggagagtactcccaggccttgaccagacagctcgcttggaatgtgatattcccgtgtgttgtcacgcagcccttggggtttgatgtggttccagaggtatagatcatcagggcgcgtcgagtgagctcaaacggcggggagaaagaaggtaaggtcggggcctcatttcgagagaatggctccagtcccataaagggtatatcagtggtgcatccttcgcgtagtaatggtgcgatcttctcaaattccgggtgcacgataatcaatgaggggtccgaatcaccgatggtgtataacagttccttcactgggtgacttgtgcctagcgaatgtcagcgtcgaatagaagatgttgcgcattgctgccatcgctttcacctacaaagtggaacgcagacacctcccgcggcccacacggcccattgtgtcgcaacgtagtcatatccattggggaccaagaaggcaatgcgtcgttcttccaaatcgtccgtcaatctcaattgctcaattatgcgcttcctcaatgctgctgcatcagctagtaattgaacgaaagtgaaggattgttgtttggtagcatcaacgaccgcgatcttgtccggatcttgtcgtgcatgttgctccgccgcagcaaagaggggtagcaaagggatgggcataattaatttgattcttggacactttgactctaaagatgaatcattcaatataagtctaataatctggaggggtaaagtcgaagaatttgagggacatacggaatcccccagggctgtatttagccgattgcggagaaaacgccatgtccaccatggacgggtgggcggcacccggatgattatgtaattatgctcaaaggtcccccgcccctaggtcttggcatactcggtcataagatattccactccgatctcggttcatatatcgcccaccagctatttaaagatgtaaggggaattggtccttcacagcaccttgtgtctgaaagagctggcaatatggccactgtcaatagcccgctactgcaaaatgacttacagcaaagctccttgggtgataccacccagacatcacctgaactcgaccgatcgaagcagcctcgagctaatatatcaaaaatattggctatatttttggctttcttaatgatgggggcaaatgatgcagcatatggcgtaagtacttcgcgaagaatcgaaatgcgatattgctaacacgcaaaagcctctattaccatatgtaagtacctatctaaaaccgtccctatgaacactctaatgaaaagaacagctcgaatcgtactacagcatctcccacacagtggcttcatttcttttcctgtcacctgtctgtggctatgtacttgctgcagttctaaacgacacaattcacactaagctaggtcgtcgtggcgttgcctggatttcctccggtaaccatttcatcggccatctctttgtatctttacatcctccataccctgctctagtcgctcttttcgtccttcagggctttggaaatggcttggcagactcggggtacaacgcctgggtcgccagtatgaccaacgcaaatcaaatactcgggattatgcacgggctgtatggatttggggctgttctaagtccacttgcagcaacgttacttgtgaccaaggctaacttgccatggttttacttttactatcttatggtatgtctttcggtctcggcgaataaaagttggtaactgatcagcagactgcttgcgcaataattgaattgatcttctgcctgggagtatttcgagactcaaccgcagctgctttccgggctgccaatcagaccgaagagcaccaagatgggaatatgagtcgagccatcgctcaacccccatatgcacgcataacttggatctgttcctttttcttccttggttacatgggggttgaagtcgcgctaggtggatggattgttacttatatgagggaagtaagaggtggggaggcatttgccagtggtatgactgccacagggttctggcttggaatcagttgtggcagaatgattcttggcttcgttaccccgctgctaacggaggagtttgccgtcattgtgagttcccctgtgtggtatattacactaaattcatctttccttcaacttgacttgatatcttttacgcgtgtcaggaggctttcatacttactaataattacgcagatctattccctgctttcaattctctgcggtttcattctctggctcgtgcccgtgttctcagtttcagcagtggctgtcacagtcctcggatttttcttaggtccatttttccctgctgcgattgtagtcgccaccaggattcttccccgggctttacatgtgagcgctgtcggcttcgcttcagccattggaggagctggagctgcgattctgccgtttgcagtgggtgctattgcccaaaggagtggtgttcaggttctgccgccaatcatcattgttttgatcatcggcattttgtcattgtggctcttcctcctacaaagcgcaaagaatatcgcacattagttacatctcaatcggcgaaacaatatcgtcggccaagtgccactatcgacgtgatcgcaggatgaacaagacattaggagagtgacacgcgaaacaagggtttttggagcagcgggggatagcgcatgttaggtccgtctgcctcggtattagggtggaaaagaataatttgttttgtctagacataataacaaaacaaatttcaaaccgaggtcgctaattcaacattcgctattactttaataaactaaagtatggctaccgcggatggtgcctgtgccagttcgcccggttggacggtgcgaggcccgtcaaacgatccttcgccattttcttccagcccacgggccaccaagtctgtgaaatcgacacccacttccaccaagagagcggcatggtcgtgcacaatgtcgaggcatttctgccagaccgatgtgccacgctgaacgctgctaagctgtcggctgagcagagcattgaacccgtccaggtgatgtttagcccaacgaatgcaagagctgctcattaccacagggaagcattgttggtagataccgatcgtgttcttgatcagggtaaaatagacataggagatctggaagatgtaaagaggtagatcaccttcaaagatacaggcactaggaaaagaagttagtatgcaaacataagcttgtgtggtggaggacgaagaacataccggatgcgttggccaatcacgtccgaacgtgccttcaggtaggtctcacgtgcctggtcttcaaaccctaaccgtgtcaaccaggtaacgtgagtcttggtagccaccgggaatgagtgtttgtcgaccagtgcccgggagagaatgccagcaagccgagtcgctcgcccatcgaccttgaaattgatgacgtcttgtgcaatgctgttgcccttgagacccttggccatttttcttagtcgctcgatgctgtacacagacgcctcaaatcgctggagcgcaatatctatatcaagttcgtccacctgcccttcaacccagcggagattctgctgtttcccgtccacatcaatgcgcaggtcaggcttgtctcttggagtatcagagaggtcaaaagactcgggcttttgcgaatgggaaaggtgccgaccagccagatatccgtatgcttcgaagggcttgctggccgcttcggtttccgagcgcatggttcgacgtaggtcctcgactgttttgcggaatgttgccagtagttcctgtttcgctgcaacgtcgtcatggcgatatgtaaagggcttgtttcccacacggatactgatcgatctcccaatgcctcgctctaaagcctcttcgcgcgcttggcccgttcccaaattggctccaagatcaatcatatcaacatcattaagaagccagcaatcttctgccactagcctcgtcggaacaggtcctcggtggttggggttgctttggtcgacccgcttacgcttcttcgcagccacgagcaggtaatcgttcaataacacaatgtgaacgggccgttttggtttccatgtggctgagtccagctcaacccaattacctgtttctaggacaatgtgccgtcctggtgcagctggaagccacttttgcgacccttccactgtcttccacaacgtttgcagctgcacgctccacatgctctcaaggttggcgaccgagctccgattcgcatttcgtttggggaaagactcctccatcggtgacatgggattaggtgagtttcctacgcttgtttgtccgagcgccgttgttagttccgccatgagggtacggagagtccgcatttcatccttgagcttctccgcctctttactgattttgataaattgtgtgcgattctgatagacattttgttgtagatcggtggatgttcggttcttgactttgcgtaggctttcttggtacttttggatgtcttcctcggacgcgttggcgagaagactggccacatctaatatcggaaactcctggttagcttgaacaagcacacagcggcggccagggagctctaacatcgatcgactggaagactgggatctcgtagagcatgcaggtcgactttcggtgctggtgaattcgggtccgatggtgatggtagtctcggaatagatgccggtgctaatccgccatgtcctccgggcatctgatttggaagcgtcggaacaggaggaacattgccatcagattcaggtgcgccattgaatcgactcgagtatcgccgtttcactaaatccgaggtcgcatcgttctgaggtgcccgctcacgtgtggggattgcggatgggcctgcatcgggagacctggtattgggaggtagaggaccggatatgggcttaggagcactgatctgagggcgctgccgacgagtcttgctcctcagagtcaatcctcggccttccatggtgatttcacttagcaatgcagcaataatcaaggaatggagtcgtctcgggaggtcaaggggatgacgctcgggctgtgggtatgattatataatccatgggctccggacatctggacatcctcgaaacatttttatcacccaactaccactcaaccactatcgcctctcaaagtcccatacattgccaggctgagaaaatccgatacgtttaattagatatcatcccacattttcgctatggctttccgaaacaccgccatcgtcgccggcacacttctgacgggagttctcggtatgtagcattcgtctcgccgcgtttttcaattattaaccctttataccagcctacgccgtttatttcgattacaagcgtcaaagcgatcctaacttccgcaaatcgctgaagaagaacaacaagaaggtcgcacaaaccgcgaagcaggaagccgaggccggcgccgcagctagggccgcagagctcaagaatgcgctcgaacaagtgaagaggaacggtgaacttccaacggatctcgaagaaaaagaaagcttctttatgagccaagtcgcattgggcgaatctctttgtgcctcggaaggtaaattgaatccattttctcatcctatctccatatcgaacgatgggatggagatatcggttacacgtcgcaatcggaatcaacaggtcgctaaatacatctccaggctcccaagtcgaagcagccattgccttctggaaagcattgaaggtctacccccagcctcaggtaagtacaagccattgcggatgtcacatattgccttcatcgtcctcttcatcattctaactgctgtaattactcaggatttgatcggaatttacgacaagaccgttcccagagaaaccctcgaaattctcgccgagcttatcgcacttgatggtggtcaatctgctggccccaagactggcaccgacgacaacatcgaatagacaactggacctgaccgcccctcaacaacttgtattttagacagatggaattctcaaatttgtatgacataatttatatcgcggagaactagtacgttcgttacccaagagccgtgggggaagcggataaagaggtgtggatgaaggctactatgtaagttggacggattgatggcgatctattgccaaacattccaattagatggagcaaaagagataccaccaatctaaagctacctctcgattttggcttctgtcctatgaagtagtataggtatttttattttctttctatgagacatctatagactggtcgattgttagaactactccataacatcctctctttcactacaaaaccttccaccatcaatcatagaaagttaatcttacagtaatatggctgtgagtactgcgtacattgaaaaaaaaaaaataagataatttatggttcttccattttgtgtactccacagcggctatgtaagacgaggaatttccacaggtaagtaatgacatcttatgcaatttctagtccccagttgatatgtggatgtgaattgaaagcaggaagaggaagaggaagaggaagaagaagaagaagaagaagaagaagaagaagaagaagaagaggaagctaagcgaatggatgagtacgagtagtacggagtagaggtcagagagacactggttggataggaggtccggagccaagggggctttccgtccgctatctattgccaagacatatgttgattccaagactttttaactttgaattgttccagttggaaacggtcatagtgggagaggatacatagagtgagagtagtatctaaaggaagagtaaataagaggttatgtatgaagtagatattccaatttaggcaggtggcattggacacccgaaagacaaggccactatttccaagccctaactaactaaccaactaaataactgcggattaattaaccacacttgggcataatctcaccactaactttataaattacagcatcgagacttatttccgtgcctatacccctgagtttggcatttcaatacagcctagattgcccagaggtggtccaagcaatcactattcaaggacatcttggccctgagtgggattcttggccggacttggcccaccaattcgtcttcggaggaaaaggaagggaaatgggaaagaaaatagaaatggacatttaatcgcttggaatacatgaatgtaattaatagtatgccactactaccatagaggactgcatagcaatatatactggatatagtgaaacgaagatgtgaaacctccaaggctctcccaagaccctccaagaccccccaagacccctattatttgttcagggactgcgattctccacaaaattgacactgacgatcaattgggtagctctacagagtagattaaaattatctcaaagccatttaactcctttgattccctttcttcctctttcctttgatttcagtcgttccttccccatttcgcgccgttgcgctgtccctcgttatctcatatcatctcgtatatcccccgcctcaagtcattccctctctagtttattgatttcctatacccacttgatttcacaatgatcgtatgtgcctgtcgcaactctattatgaccaaaagctgacctcttagtcttacactcgtctcttcgcatccgtgtgtgcgctcgccagcgccgcggctgctttgaatccactcgaagtcagcggcaaggactttgttgactccaagaccaaggatcgtttccagattatcggtgttgagtaagacttccttgcctttttcttgcctgtttcttaccccgcacattctacagtggctgacccctcaatagttaccagcccggtggtgaatctggtttcactacgaagcttgatcctctgagcgatgcagatgtctgcctgcgtgatgctgccctcatgcagcgcctgggtgtaagtctggaccccgtcttccttgccagacagcaacttatctccataggtcaacaccatccgtgtgtacaacctggaaccctctctcaaccacgacaagtgcgcgtcaatcttcaacgctgccggtatctacatgattcttgatgtcagcaaccccctgcccggtggttatctagaccgcagtgccccttggaccacatacagtgccatctactacaagcaggtgttcggtgttatcgagggcttcaagaactacgacaacgtcctgggcttcttcgctggcaacgaggtgattaatgaggatgccacttacatggctcccaagtatgtccgtgcgatcgttcgtgatatgaaggactacattgccaagaactctaagcgcgccatccccgttggatactccgctgccgatattcgtaacatcttgatggacactattcactacttcgagtgtgatctcaagaattcgacctcttcccgtgccgacttcttcggcctcaactcctactcttggtgcggtgactcctcctacaagaccagcggcttcgatgtcctaaccgaggacttcaccaacgccactatccccgttttcttctccgagtacggctgtaacgatgtcaagccccgtatcttcaccgaagtccaggccctctacggcgtggagatgacccaggctttctctggtggtctcgtttacgaatggacccaggagaacaatctctacggcctggtcaagatcaacgactccaagaccgtgaccactcttatcgactatgacaacttccagaaacagctcaacaagctggatattgaccgcatcatgtcaagcaacgccacacaaaccagtgttaaggccgagacgtgcagtacctcacttatccagcgcaagtccttttacaacgcctgggatttgcccgaggtcccttccaaggtctcggactacattaagaacggcctgcccgatgcccccgttggcaagttggtttcggtctccgctaccaccattccccagaaggtgtatgactacaccggcaaagagattaccaatgtcaagtttgaggtgaagagcggtgccaacaccccatcttcttcctcggcttccagtacctccgattcttcctctagctccggtacttccaccgccaccaatggcgcctctcctaatggcgccccctcacttgcccttggtggtgcaggaggcttcttcatactgcttgcatcccttctgtaattgccttgatgatttgtaattatttcattcttgggtttcacagttcagacgacatgaccaagaggctgctatcggtctcgaggatctattttctgtatggcttatcctattttattctttgcccagctttcttgtgattcagttgttattctttacatagttccttcggaatgattcgtgtctttgctttttctttcgtgtcttcaaactttcagcaacaagccatcgcatgtacattgggaaggagttagagacaaaatgcaccatagcaaaaaatccttccactttctgctagtgcagttgtcattaacattgttatttatcccacattttatcaacatcacagcttagaagaaggatcgtcatttatcgtagctccaatggccgcccattgatcgaagcctttagccctagttctcaagacttgcttcaacatcttggtaattccgtttggatcgttgctggcaaattaaggaatgactttgcagcgtggcctgtcattttgcgcttcactaggtttcttctgttgaaaagagatagcagggtttcactggcaaagactacttaccttaaaactcggcttgctcagtaccataacatgagtcagaatgtctcgattgatataaatgcaaagacttgagaatattaagcaataacacgaaacacaaaaatcaaaatgaaaattgcaacataactcaagagattctaaatggccctcgctttccctttgcccttgcctgacgatgatgagacaggcgttggccctggtgagagggatggaaattcctcccactccttctcaccatcctcgcgactcttgccctcagccaagctgagctgaatcgcaaactctaaatcatccatctcttgctgtctactgctctccggctcctctgctccaggggatggctgtcgaggtgggcgtactcccttggcatacttgatagggatagacgatgtttgttgctcatcaagcaggctaaggcgaattgcttcggcaagttcatcgtcaacatcatcgtccgcgggatcttgataaggagacgaagaggatgaaatcccgccagggccaaatgaactaggaccagcagtgtcgaatgaagcgctcgtggccgagctggagaccgcggcgctgtccctaggtttcgccgcatcgccagagcaggcttcctcgctcagaagttgggcatacaacaaaagctgttcctcgtcgatatccggaccaagaagatcaattccaaaacgcgcactcagatgtgctcgttctttctcatcggcaatcctttgacgctccatatccacgcgttcgtcgtggataaagtcctcgattgcaccccgaccactgttgttgaagcgctggccttcgccagccccgttgctgccacgcattaagtggcgaaggcgtcgcttgctgcttttgtattgatcagcctcggaagagctgtaagaccagtatcgcaagtgggtgccaagtgagaccattccacgcagaacagttgggtctgtatcaaggcagatagcgcctgcggcatagtaattgtttccaacacctaagaaagacgactcagcctgcacaagccgacggcgggcccgcgttgaaaaacgcgagttgatcgttcgcattggcttggtagacgatgctaatggatcccaggcttgtacgaggccatcattaccgccatgaacaaggtacaaagatgtgatggccaaggaagatacctggggggagtcggtttggattgtgcgcaatgtggagatggagttgattatctccccagacttcgccgccggggctcggatgtcccaaacaaaaaccatcccagtgcgagttccaacagctaggtatcgagctcgttggccgggaatttctagacccgaccgcggcagatccatatgtggtaacattggggaggatgcggcagacgacatagagctcctagacatggccagaagaggatcctcttcggctgtgagagtggcgaaagtggacgtatccaacgcactactgctcacctccgtcgacttgcgatcatcaaaaacaaaatccgacagacgccacgtgaagttggtcgaaggcaatgccgtaagccctgaggaccgagaggagggaaaactgctggtggcagtcgggcttgttatgtccactgggccgccgaaaagtgacggtggaacttccactgtacccgataagggccctggcatggccgatgagccaaggacaggcctaggagcagtgcgcatgaaccgccggatcgacgcttttgtatcatcgcccgagccggtagcgatgataatgattgactcgcctgccccgcacccgtcatcgccagcaaagtccaccttaagatcgcgttgcatatcccagctttcgcagaccttgcggaagtgtttgggtttcaaagaaaagaaattctcaatctccttcgtttcagcggcaacctggtgctcattgagacccatggaatccgacgatgatcgcggactgtagcttccatcgaccaactcaggattgaaagggtctgggcgtgccacacgtctgcttgcttcaaccatctcccaatgcacacttctaccagtcttccaagccacctcgtcaagctgctcgatgttgagtttggctgtgagtgggatctcaggtgctcgaggaagttctgtgaggtagaatatttcccctagggcattgagagcaacagcccaaattcggtttcctgaatggcgctgggctgaatagtgatcatccaccgcaatggaaatgataggaacaccagggcacaggacccatctagcagtcacttgacctaggtcatatcgtctttcgtaagttggatgagggcctatagaatacgcggtcaacacgcctgaagacgatccagacatcatccccaccagcccctgagtgatcttgaggatctgaggggatttggcaatccacactgaacagatggcatgtgtgatcatgtttatggcaggtatgccgagtggtgggtgagaacccaaattcgaagctcccacaaaacgaccatgctgctccgtttttgagatgaaatagctacgcccttggggacagccctcaccatagatcatgccatatggttgactgacgtccatcgagttaggcacaccgaccatatcacccgatccgaggccgtattgcgcttcaccaggaaacagatcggcaaagtggcggaacatttggtggtcggtgacaccccaggtgccaacttttacggccgatgggtcactagctgacgcaatcccttgctctgcggctccatggacgaagagagggttgttgtccggcctgaaagaggcatgtatgtgactgatcggaaagagtagctgcgacgtatacgtagctatggcactaccatggcgagcactcgccgtgtgtacagttccatgcttcttggacgggttgaactgcgccggtttgcctctggctaacgagtgcatcaagcgagtacgcaatatgtattcgcttcgccaggaggctagcgcggttagccttgcgaataatcgcctgtccgactgtaggtccaccgcatcggtattacgctgaccatcctcaacggcatggggtccggggaagaatcgcgagaaggcgatcctccaagcatgaggagtggtcaccagcgcatgaaatcgatgggacaccaatgtcatggcggacaaagattggggtggtagatgcgagagaatatgggtgagaacctctgtggagattacggttgtcagtaataattgcgcagcaggtttgcaggacacccaccatttggaaatgtttccaaagatgtttgcgattgttcaatagaagccactaagcaagatccagcattttctgcttgtccgggtggaatgcgagcattttcatgctggctcactcgatcggccgagggcggggcatggcgaccgtcggcctctttcaaggacgcgtcttgtgtcgacatgctcgggacgtccgcatagtctctgatcgcctctcgctcgaggaaatcagagacttgaggttgagtttcgtcgaggtcatgtccatgctgggtgggactaataatgactgggtatgagtcgacgggaggcgtatgttgagacacggcagtaggctctggttgcataaaaaggtcttgacggaaaggtgaagtggtagcgaccgagccagcgagaaagcctgggtcagtcgagttaggaaatgcgggacgaaaaggagttatatgaaagcgaagcgatgttgaagagaaaggatgggagagaagcaaagatgccggaggcgaggcgaagtggccatcccgcacattatgcagatgcgcagcgaccgcagcgtcctattggcttttacaattcaccgccttcttctccgcctttttccgagtaattcctatacttcaattgttatgtctgactgagattttctatgactagttagatggataactaactactccgtagtagtcaaatactccgtatttggagctcatttgtagtggatttgtcatttatatagaagtagaatagtcagccgcttatatgacctctgtacttggcggtagaggacatgaataatttggatgctaaattagttcaagatctgtttaaatgaattttctaatgtcatttccaatggcttttgagtgtgtttgttgtgtctcttctagtgtcctttccggtgtcttttgatatcagtcgcaaattatccgattttctgctggcaataaaagcgtcggtatgcgatatgcggctctgttcgactttggatattactttagctatgcgagatggagaagaaaagctattatcttactttgagtgtaatactatcttatcaactgttgtcataatcttgttaaaaaattttcaaatatttttcctttaccttctctcaggaatatttatactgaatggccactatccaagacgcgctcagcacgtgacgacgcgacagaagccaaaccaacgagccctcaggtatcatcgactatctcagtacaacttggttgtgaggttgatatgatccccctggaataacttattgatccactgtatcttctcgagttattttcttctggtgccgcatgaaccccagtatcccgcataaacgccagagctgggtgagacacgtgaattcggtagactaagatgcctggagcaaatggtaagacattcccgatactgaatctatattcagcttactgatctccgtacagaggctgaaactattcgaattctcatctccaccgataatcatgtcggttacaacgagcgagatcccatccgtggggacgacagctggaagagcttccacgaaataatgtgtttggccaaggaacgggacgtcgatatggttctcctggctggagacttgttccatgagaataagccgtcgcgaaaatccatgtaccaggtcatgcggtcgattcgcatgaactgtttcggagacaagccgtgtgagctggagatgctcagcgatgcaagtgagaatttccagggggcattcaatcatgtcaactacgaggacctggatatcaacgtggcgattcctatcttctccatccacgggaatcacgacgacccctcgggagagggtcatctggccgcactagatttactgcaagtgtccggccttctcaactactacggccggactccggagtcagataacatccaaatcaagcctgtcttgctacagaaaggccggacaaagctcgcgctatacggaatgagtaacgttcgagacgagcgactgttccgtacctttcgcgatggcaaggttaaattcttccaaccgtctgtgcagaaaagtgactggttcaatttgatgtctgtgcatcagaaccatcatgcccatacagaaactagttacctaccagagaactttctgcccgaatttcttgatttggtcgtctggggtcacgaacatgaatgcctgattgatcctaggctcaatccagagactaaatttcatgttatgcaaccaggatcctctgtcgcaacatccttggtacccggggaggctgttccaaagcaaatctctattttgagcataacgggccgagaatttaaaaacgaacctatccgattgaagacggtgcgaccatttgtgatgcgggaaattatattatccgaagaaaaaagagcccaaaagcttgcgcgcaaggagaataaccgcacagaagtaactcggttcctcatgtccattgttgaagagctgattgaagaagccaatgcagaatggctagagatgcaaggggatcgcatcgatgaggatgaggatggcacatcggaggctccgcttcctctcgttcgcctccgcgtggaaacttctacgcctgaaggaggtagctacgattgtgaaaacccacaacgattttccaatcgcttcattggtaaggtcgctaacgtgaacgatgtggtgcaattctaccgcaagaaaaaagctgcttctacttcgcgcaaagatgataaatctgttgatgaatctaccatttctcatctatcagctcttgacactgtgcaagtcgaacagctagtgcgcgagtttctctcatcacagtcattaagcatcctgccgcagaattctttcggagatgctgttgcccaattcattgacaaggatgataagcatgcaatggagatgttcgtcaatgaatccctcgagagccaggtcaaacacctgttggccttggatcgtgaggaggacgagatggatgacgaggagagagaacaaagctcgctagtgactgctatggagaaatatcgcagtcagatggaaaccatgttttcaaagggcgtgaagaagcgaactcgcggaaagaagcgcttcaagcccaagccagatggttgggattccgagtttgatggcgtgtgggaagatcagcctggtgcacttattcattctgacaacgaaggcggggatccagcagaggaagaggctggagaagatgggacagtgcccgctcgtggtcgtgccgcggctcccactcggggtcgtggtaggggtcgtggtcgaggtgcagcggccagtgcgcgaaccaccaagaccaaagctattccagaaaaaacgaccacgaagggtcgcagaaagcaagccatctcagacgaagaatcagacgtgattatgctggatgatgatgacgacgatgttatagccgatgtcatttccgatgatgatgatgatgattcgcaggcactgttcgttaagcagcctcgatctactactaccgcgaagccacgaaaagctgcccctgcgaaaactacgacccagcgtcgcggtggacatgctgctgcctcgccagctccgtcatcggttactgttggcgggactgcttctcggcgagcccctgcgcgtggtaagacagctcagtctacgctcaacttctccgcttcccaggccagcgcacctcagtcatcacgacctagccgctccacccgtaacatgagtgtcatcagcgatggtattgatgacgatgacgatgacgatgacgcctttgaagaaatgccgaccaactcgaggcgtcttaagtaatttgcgatttaccgccatggatgtttcctttatgcatgtatggagttatcaagaatcactcgagcgttaccatcagcgttgttgccttcaatccttcaatgatatcctcaaaatacggttctcaaatgtcagatgatacaataaattataatcaatcaacaagagacagtacttgaagttgtgacctttggagatgaagtataccgacaagctagtctcaacacggtaattagcttaaatcgcaggaacttgggctcttgtccctaccgctcagacccagaggcttcgataagccaatgaccgaacgagatcacttttggggggcagaatgtgattcagattcccccttacttcgtcaaacacaccagagacaacgtagatctctttgtcatttgttctatcaaccccgcattcccagccgaggggcacaaccacctcggtgcaacacaagctcaatcctctattgcatcatatattatcctacctctgtgttcaaggatacaagacaatactggttaacgcacaatggcatacaaaggtcgacccgttcgcattgcaggttagtttacttgcactcatgatgtactccagctaacctgttaggtgcctcgggctctgcctcagaccggcggcaagctatcgctgattttgcacgtcaccacccgaccgatcctatcgatgtcatcattgccgatttcatgagcgagttcaacatggccactgccgccggtcggcgtgtggaccagacgacttcccgagtaccaacagccccggcctacgagccctcttttctagaagcacttgagccggctctggatgatctggccaagtatggaatcaagctcgcggtcaatgctggagtgactgacacgaagggtctctacgaggtggtgctgcgtatggttgaggcaaagaatctggacttgaaggtcagtcggcgccttacccaaaattaatcaacaattgctgatttgggtgtgcaggttgcatgggtttccggagatgaagtactatctaccgtccagaaggaattggcttccgggtctgagtttcgcaacgtctacacaggcgatcgattggcagattggccattcgagccaatatatgcccagtgctatcttggcggcctcgggatcgcgggtgcgctcgcaggtggtgcggacattgtattatgtgggcgggtctcggatgcttcacctgttatcggagctgcttactggtatcatggctggcagcgtgacgagcttgacaaactggcgaatgcgttcgtggcaggccatctgattgagtgcagcaattatgtctgcggtggcaatttcacaggcctcaaagccctagaatacgcagacggggatggctggaccaatatcggatatcccatcgccgagatatctgccgaaggtgacgttgtgatcaccaagcaggcgcatgccaccggtggtgcggtaaccgtcgatacttgtacatcccaattgctctatgagatacaaggaccttggtactacaactctgatgtcactgcggtcctcgataatatacgctttttgcagtgcggcgtcaatcgtgtcgctgttcatggggtccattgcggccctcctccgcccaccaccaaggttggcatcactgcgcgaggagggttccaggctgaggtatggtggtttctcaccggtctggatatcgaagccaaagctcgcatgctggaggcacaagtccggcacttgttgtcaccctattcgggcagatatacgtcactcaatttcgatttactgggctcttccctctccgacccacccaaccagaaccgcgctaccgtgccgttgcgcatcgtcgcacaggcacgacatgcagaggaccttgcaccgacacgcttcctcaaacatatcaccgataacatcatgcagggctatcctggtgctacctttcacttagatatgcgccaaggattcccacgtgccattttcgagtactatgtcaccttgctgccacaatcagcagtccaacaccgcgtccatatgccctggaagccgacggcatctgcgcagaccctggatatttcgcctccggcaaacactaggatatatccatcacgccaaccctcgcagccgaccgcgcgcaccgacagacccgtcgaccttgcccgagactttgagccgacgagtcgcggcccgctaggctggatcgttcatgcacgctctggagataagggtaccgacgctaactgcggcttctgggtgcgtcacagtgacgaatacgaatggctgcaggcgttgctgtctgttgataaggtgcaagagctgttaggagagactgcccgcgagaacacgaacttggagattgagcgcttcgagctacctcgtcttcatgccgtgcatttcctgtttcgcaatctactagaccggggcgttggtgtgaccaccaccgtcgatttcctgggaaagaatgtggcggaatatctgcgggctaggcatgttgatctccctgtgcgattcttgaaccgcggaaagctatagaatggagttcgctgtctcattcacgggcgactaagtatgccaccggggcataaccatcgttggttaatattgccgatccatgaccaggagacttggatttacataggataaaggcgctatcccatcgtgtacggagtatcttcggggacaccgaaggacagataacatagtggaaatcaaattgatcaataaatactcaagaatgagaacaaatatccccaaacaccgtgctatcaattgcttctgtcaaactaggtagtagggaggtcttaatccagatcagatgcagttgaacgctggggttcatctatatcattgaggtcttgatgctgggaaggccctagaaagaataatccagccagacagagcccagaaaatgcggccaagccatagtatgggagcccaaaccaaatccctctgagcttcataccctgcgaaaaaagccatgccaatgtcgacccggcaaacatagacccgaatgtttcaaagatcccaatcatcgcattcatcttcgacttatcatgtgctcccatgtagctcatagctattgatcgacatatcgcattcaagcccgcgcctgatgtctgaagtattaatccgaaaatcacaaggccaatgcgcggagcccctgtaagaaaactcccaaaaatcgccaagcaagccgaggcgcgtccaagaattgacagctggccgcaagtattttgaaagtagctttgatatcccagggaataagacaagtaaaatgagcgaacttgaatcatcgcacttcctcccgacaagaagaagatacataaggataagagaaaagtcgcaaggcgcggtttctggacaggggacggagtgaagctggactccaacagcggggcgttctcgttccccctgtcatgattctctatacgcatggtttatcgaaataaaagaaagccaccaagtggctatgaaaattcaatttgaaaggtttggaaaaggtaagtacaacattttggaaactgttgccattgaaggggcgacagggccttggcgatgacaactttcgcgtttcaaattacgacattgcgataaagaagcacccagaccagagcactatgttgtagattttagtcctaattagagatatcatctattctgctgtctcaaagactcatttgactgcaaggctccccgggtattttgtaacctctggcgtcggatttgttagttatgagagccttaggttgagtctaactgcatcgacgagggtcctttaccactcaaagtaactaacagaggaccatacaccttttaagttgaatgacaagacgttttagccatcttagctatctgcgaactttttctacgacatccaaatatatatatccacgcgatatgacctcctctccgccccttaaactgagtaagttgcgagattattggaacatacacgatacatgcagatgcacctctgtcttgctaggaagcaaatcaatcgtctttttggatgttgcatctcaccagtcaatttcagtctccgcccctgagggccgattgtaacgcgggacccacaagggccgccgcgggccggggacccgcattttggatccgctatctggtatgtacattgtacagtgtacaatgtgcagtaacatcgtacaagaacatgtagagatctcgggagatggcagatcaggtgatctctgaatggtacagttgcaagtcatgtgatcagtattgagaatactgttactatagtaatttacataagctggttgaaggcctaaagtagtttagcagggattgtgtaaaggttgtgtaacccttctctttccctatcacctacacccacttggcatctgctttaccacgaaggaaacgctatttcgtatcaatcgaagatggcagaaactgcatcagcgaatgtgaaaactagattcctggttttttccgacacacatgggcttgatactccaccaaactttgtctcgcgccattatgcggatgtcgcaattcactgcggagatctcactaccgaatcgaaaatcgatgagtacaaagcttcgatccgtttcctccaagccgtgaatgccccgcttaaacttgtgatcgccggtaatcatgacttcactctggacactccaatgttccagaaaaaggtcgcggaagcccaacccttagatcctcaactagttcaaaaagtctacggcaactatgaagaagctcgagggttattcgagaaagaaacaggtatcacttttctagatgaaggtatccattcctttcgcttacaaaatggtgctctattgaatgtttatgctagcccgtataccccatcacttggggattgggggtttcaatatcaccccgagcgcggacatgactttcgaattgagaatgtcgatgtcgtgatgacacatgggccgccaaagggaattatggattacacacactctggccagcgtgccggctgcccacatcttttcaaggctgtagctcgagcccaacatcgacccctgatgcattgttttggtcatatccacgaaggatggggtgccaagattgttcgatggcgtcagaaagttagcctggagccttctcacttgactgatatcgacaacgaaaagtcagtcctcgtatcccgactctctaccatcaagggtaaagggaaccccacagagtgctctactacaagtaattgctctgaggatcacaatccactgcaacggggctctgaaacactttttatcaacgccgcgattgagggctacgaagatccttcgatacagccaccgtggcttgtcgagctcgagcttccagcagcggcgtgagaacctaaacttaccgtcgcgcttgtagtaatgaattaggcagtgttcttggttcttgtcatgttctattcacaatttgtgctaggtatatggttaatgtcatcgcatggtaagtaattttcactagcccaagggcaattgctccatctaagaatacatttacaaaataatcgacctcccgtcctcctcctgtaataatgagtataataataggcaatccacaacccctaggcgtctcccagctccgcgcatatactctagttcttcgacattgagcctggaaggattttccctgcctttaccaacaccgacaacagccatcgaaagtctgcaacctcaccatcactcccacgttcagccaccgtcacggccctcaatctcagcaagtccgacatggatgcaacagagccctcgaaaaagggatctgccacgtggatgcgttcgatggcgtcttcgatttcgataatgtcgattcggacgcgtattccttgactatcatcgaatataatcttgccgtcgggctcgagagaaaagttgggggcaccgtccatcactctcttagtgatgtcatgaatgacatcgctcggtgcagcaacatccacatcctctgtatagaatacagggtcgtgggcaatgctggcagcgccgccaactagaatgagttgacgacgaagttcaggacggactaggcgggtggctgctcggaagcactcgatgagtgcctctcgtagtggtgcagggatgggggtgcacttcggcatgtttcgaagttacggggcaaaggcagctgggcagggcctctgaatacatttagcacatccattctgttgccacatactgcgcctgcgaagtgatgagcttactggagtatatgcagcggggagctgggaggcccgggggtacagtggattgccttcacctccatgtcagtagaagctcacattgtagtctgatgctcaaactcacggccaaaagatgatatatccaataagcatgtatctatacaatgtccgactttgtggatgtgtataatggcgattatttgataatacaacaagcttgcagcgccaaatactcattttgaccgcagtacttgccattctcacctcattcccagttgtgcctttcttttccctcacttcacataatctttacttgctgcggttaccacctgccttcaccgagcttttgggatgcagtagcttttcaagattaaggaaagagctacgcacattcaccgaaaccgcatactgacatacatgtaaacacaagcagtcaattccaaccactagctatgaacaccaccgagccacagccagcttttcctcttgcttattgcaggtgcttttgcattatcaacgagagcttctgctccgttcctccaatgatatcgaaataactatattgtaccgattgcttaatcaatgggtgtgctccgaattcgccgagaactcaatgaaacaaaacaatacccaatcagcaccatatggcggctagtctatgcatttagaacagagcatcgtgatgaaattataataacaaagtccgtaatatcattttatagaaagactcggtatccagactacgcgctgtatccctagtagtcgccatgcactgcgatatacgggctccgagtatctctgttcgacagtctatcataacaaaatatgctttacgggttaatctcgaaaaagtggagttaccacggataattgatggataattgcattgaacactatgcctttgaaatggcaataggcaagaaaagaaaagccggagatcgctcagggagctagggcagtagccttgatgcgagcctcaaagcaaaatccaaaaggatctcagtacccaccagccagagaaccacccagctttatccgtttcacaacagtctattagattgcaagtcgctccaccttggctctaaggtgttcgatctgtggagctaggtcaccagcatcgttcgaggtgatggtagccgcgataatcggccgggtcacgccgcatgctcgaccaagagcgtgcttgttaggcagaaaaacgtacgggacgttcttgtcttcgcaaagcacagggacatgcatcaatatcgcgagaggatcggtgtcggcggcgagaacgactatttcagatgtgcctcgactcagggacttcgtgactagacaggcaggcaggcattagctccatagttagctcaaagtattgtgaattgtgaacagacataccttcatttgcgccttttttgacctgcttgtattgcatgccttgctgcaacaagtccaagagttcctgtgtcaaagcaggatccgcgaccggccacgctgggaattggttggattggagaatcaaaatgaaaaacccgacgcagacttacggacacactgtggggacgattccatttttctagagggtcgctgtgcacctcagaaggggagtgagagacaggaaagccaatctcgttggggagattggttggcgaagttggaaacaatgttgagaaagtgagtcgtttgcagagcaagtaggtagagcgcggtatgaaactgcgaagagaagagacgaaagagagggagagacaccacctatgagcactttccttaaacgaaagattgtcggccacgtcaatagatcattatactgtacatcattacccagacatcttgagactcgaatatcaccgaagttatacacggaaaaagagttaactggttatatttttcatggattgaacttgaaaccaaagatctttatatgaattcaatgttcttctaaacataatgacaacgctatgcaaacaacgctctgaaacgaacattggaagtctctatacacttacactggtcatggtagccgagggtaagagaggacgcagaaaggctactgcatcaaatattcacattcctatccgctcacgagaggatcaggcgtaatgttggtggcagtgatagcagcagcctcggctggcgtgatggtgccctcagagggagtatcagtctctttgggcgtattattctctacgttctcattcttaacgggaggctttgtgcccttttcacgcatcgctccactttcaaatgcttcttcgggcagaggacggacatggggctgacagatccaccaaggccttccgtactccgcaatcactgctttagatcccttcaaagtctcatcgggttgtgcttcaaacttctcgggagaggcttcgtactcctgaagtccacctttaatggcctcttcgaggagggccaaggtgtgctcaaaagcggccatgtcgcctggtttcgatgtcgcaagagcatcccgaacgttggtatgggttccaaccattggccgcaagacttggaagagatgaccctgcatgaaaccgaggctggcagagtgacacttcttgcccttctcggccttactccgcttttgctttttcttgagcgggccctcctcgtggccgttattttcggcatcattgatttctgcaaactcatcaactgggtcggatggaagataaagtggcttcctttctggaaccggctgttcgagaacgtatttatagatgatatcaaggtatcttcgcagcacggcgtcaactcggtaaccgccctttccatcccgcccgcgccagtattctctcccttcagtgccggctgggggtggcttgctgaatatggacgggtctgataggtttccttcggcgctcatcacagcgtcggcaccggtcgcctcgagacaggtttcgatgtcaccgtagttaagaatgtttccattggcaaaaattaccgtatccgctggtagattgtctcgtaaatagcggatatagctccagtctgcaactcctgtattgtgacccttttgttcccgtctgcgtccatgcacagtgatgatgctggccccagcggagagaatcatcttagcatactccaaggtcttctccttggtctcctggatacggaatttcaccgtgacaggaatcgggagttcagtgtgcaaccgatgcacaagcttatagatcaagtcccagtcctcctggaggaaagctccgtagtgtccctttttcgcgataccctgcgggcagccaaggttcaagtccacggcgtcgcaatgaggtgccacatgacgggcagcctccaagaactcatctgggttgtttgtgcaaaattgaacgaaaagtggccggtcaattgcgggatttccgtcaagaaacaattcatccttgttctctcctttgcgggtaggttggaaatgtttggcccggacgttctcttgttcgccgaaaagacgtgcgtgaaacattggggtgtatgcgagtaacggtttcgggtcgtttggtggcatgaatgatcgagtaagcatgcgccacgcctttgggaagcattaacgtcggtctgcagatgttgctacttggaaggcggactcacgaattcggatctgtcgaccattggagcaacaacatattttgggctgccaatgctttcataaaacttccttccaaagagcttctccttaggctcacgcgcagccgcagagggctgctcaatgctctttggtgggcttgtttcggaggccatttttgagagattggactgggaaaaatgtctagaaaatcggcccaccaaagagttgaaaggcttgaagatacctatgttgatgcctggaaggaggaaaatgtggttatggtcaacgatcgcctccagtcgcatcacaatggagaaacaacttttgcgaaaagcgccgtatctcagccggaattactatttcccggcttatcttatcgtcgcgggggcgattggaagctgcgaacgcgttgagcttgtggtgtcactggggaaattgactttacatctgatgttttcgacagtaccttggcatattcctttccttctcatacgcctcacaagcaacctgatcaacctcaactgcctaggtgatcccttcaagatcggactcgcttgtggattacataatctgatatgaataccccggcgccagccagagactaaccaaggaagtctcgaagtcttttagtgagaacgggaaccgaaaaatatacattttttgatgcatatatgcgatgctgtgtgaaagggaattaatattgtgaagcgagtgtgttgatacacggaatttgacatagttctttcttgatcgctcactgttctgatctctcgcctgccaacaatggacgcgtcaacaggatcaggaggtaagtccatagtccacataatcttctgtccaagtaactctgacagcgtgctaggtcctctaaatctctgcttgtctgaagatggactatatgccgcccacgtgagtggaaagggcctgattgttcactctgatgtagcttcggaaaataaggaagtgcagatcgcaaggatcaaagagattccacttaaatcacttaaatacttcaacgtggaaagttctcgaacatcagatgatgaggttgtctctcgacgactcctgtctgcaaacgacaacagaatctcggtctggcagttcaccccccttgaaatattggccgagattgaaaacatcgaaccgggctcattagctgttgattttggcgctgatgagaatgaagttctggtgtttcatgcgtggaacactaaactcagtgtccattcattagagaccgggcgcagctcagtcattaaaacaccaaaattcgcccatcacctcggttttggttatcgcccaagaactaggcacctcgccattctgttaaaaccggagacttcagatctactgaccgtccacgagccccggtcctacgagctcgtcaacaggaccgtgctttcaaccattgatgcgcaagggttgaaatggagccccgatgggaaatggattgccatctgggatatcgctagtgcaggcacaaaggtactggtattcacagcggacggtcagcttttcagaacgtattccggaccatctggggtggacgattccttcgatctcggagtaaaacagattgaatggagcccggctcccaataagggcgtttctggaatattggccgtgggaaaggtcaatgggaatattgacttactccggactcgcacagtaagttgttttccaaatatgtgcggcattatttgctaatcctattgtggcagttctcctccgcaacaacactctctcatgtcttccaaactgaccagcaatgtctcaatatctggcgtgagcgatacaccagtgccgcaggggacgctgaatatgccgaggcatcctgctcatctgcattgagcatgagccccgagtcggcagggccaccacggggcgtcttgacaatgaccttcagcccagacggccatctccttgcgactgttgacactgcacggcagaatgtcgtttggatttggtcactagagggcaccccgacacttgtatcagctctcgttcatgaacaacccgttcgacagattgtatggcacccttcgacaccacaactcttgattaacactattacgaatacattgcctgctattcgatggtggtctccaagcggtcatccattgattgcccgggttcctatccagaggaacgagagtggaaaatatgatgtgagatgggttgcagggacaaatccaaactcgccgttctggttcagctcaccagagcaacatgttattggatatttgtctacccttgacggtgctgttgaatttgaggtgttgaactcggtgagcagcaaaagtttgtcatgattgagaatgagtgtgtattcgagaggaaaaggggctctcaataagtcaagtgcctctaatcactggaatgaactggttatcggacttgatagtatagaactcacattcggtgctgtcacttagatctgtgatcaaacagaacataggataataccgaggccgcgactttgttataccaagacatagcataaacatggggattctgaggttatatagcctggtcaatcgctagacaaatagaggaccttgtcctgaaaggaactaaataactatttgcactatctagctgtttcacttggtcatggtgcaataccttgtcgtctgagcaatgggcgaaaaatgaagcatatgatttactctggctaacaagtcgacaagttaaaaaaatataacaaaatcaaaagtaaaactccgatagggggaatcgaacccccggctgccgtgtgagagacggcgatgttagccactacaccatatcggatgaggactgcgaattactctcttaggtttagctttgaccttttgggtttagctttgaccttttgggtttagcgctctttgtccgtgtgcgttcccgtgcgtggttctataaagtcctccctatcgccccttcaacttttcgctgtatttctcccgcccgctttttctttctcctcgtcttcgtccgtgctctgcaggtgaggcatttctgctattgatccggatcactgagctcctaacctccgctacccccttatccctcgacttgactcatcggctattctgcgctcgtacgaatgcaatctacgttgcccgccctgtctttctcagctccgaccggtacgctcaagataagaccgcctttacccttatggcgcgacgccgaccggcagacaccgaccggcaggcttaccgcccgggatatcaatcggctgtaattggcttctgtgtaagcaagcgcagtcgccttaactatattcttctataaaagcgtcgcaagactgaacttcgggccaaaacgttcggcagcaagttttttatgattgtggaagcacttttccattattacggtcatcgctagtgaggtctgctgccgatagcgcctagatatcgccttaatgcagttgcccctcagagctctcctacagttcccgatcatctgttgataatatcgtcctgtatcgcgaaatggcaccgaccacgagatcagcggctaggaaggcttttactacgtcgaccttgactcctccagccttgaaaatatcagaggttctagaaatgattctgcttcagataaatatacgtactcttctgacatcttacctacgccgctgggatatgcagtcaacattgggtgggcttcgagtcatctcccgaactagttgtagctttttaaagacacatattagcttgcttaaagacaacagcttcacaaagacaccagcaaccaaggaaaactataagcgagaacatgcacgaaaatcaaggatcatcgaaggtgatcgaattcttcgaatttattcgctcgtcatgctttttttctcaggccaattcatttacaggttcaaacaccatatatggaacctcacgacttccctagaggacctccgagttgcgggtattggtattagctaagaaataacacacattccattctacgagagcttggctatatctgccatagaccagagtgaattcagacgttgggcgactgatggggatgccagaatccgacccgaatcttgttcatttcattcgaatgcaacaggaaatatgcattgtgcgacaaataaggattctcgaggcccaataaccaaatgataaacttaatgaggcccatgtcgtactcatcttggtttgttcgtttcagttttcgttgagctctaacgctcaccatttatcccggcgtacccttgtcatgttcgcagtacattagcaaaatatttctatataatgaatcgtcggacttggatttctatctcctctatttgagaaaccgaatctcattcctatactgcaagtggtccatttatctttttattttctagggaatgtcgcctgattaggtgctttcccagaggccctggcgttagcccccgagttttcagtccctatataatcaactgtccgtcggtcgttcgtaatccgttatcgatgtgcctcccgctctctttatatagtcacctacgcgagagggtctacgaaccgtaaaatacaaagaatggtctgatagggccttgctatggttgagtgatagcgcctgctttgtttacgctatgaccggaatataacgtggcttatttgaccaatcgaactgccctagccgcgagccagaggatgctaagtccgcaaacattgcggcacgaacggctagcccctaatttcgtgatgtcctcatagtacgagctcataggcccagattgcaaatgcgataccgtccatccctcctccaattcttccggcattatgaaaactgctttgccgcggaatattgcttgttggaggccaaaacaacggtatatttcagcttgaacatttcggctgtgcacggttagcactcaggtcgtgctcactaatcacgcaggcggatatccatagataacgactattcctgcaaccgcacaaaacgtgctccgctgccagcttacttcgttgcccagtcacggaaacccctgcatatgtgactgatgcatagtgtggatgatgcctagcctggcgctaatgcaaagtatacacatgtgatggattagtctctgtggcttgagttttataatctacctgtttattcacaatataatttacagcgtatcgagaaatatatttttatcgcatatatagtgaagcggatactgcaaccttagaatactctatacctcgttccctagctttcaagtccaactgctatacaccttcgtaccaactgccaccttatatctgatctctcttcacctgcgcatccatagctggcttatggtgttgctttcaggggggtactaggaagatgccataattttcatacttcaatgttctgatgctcggtatcttgagttattttactaaggtatctagagctttgactccttctatggttctttggataacaaatacagcgtttaattgagtgaatggctctgtctcaagatagtaacttcagaatttcgggcctccatatagggcagcaaaaagaaaagcaagggcaaaggtccagcttcacaaaaactcaattcagtccataaaggccggctcgtctgagtctgagtcagaggcctcctcctcctcttcattatcatcacctggaggttctttgattgacacaatcatggcctgataaatatcctctgccacaatgatccccctcgtagcttcatcagtcccaggagtgctttcgaaatcctcaaaggttctttcctgcaccaaacagtctggtagcttgtggccggggatacttctcgataatatctttaacatagacttgcagagatattcgccgggtgttggccagaatagtctgatgttttcaactttttcggtaaagttgagattgccttccttcttgcagtgtatgtaggtaataatgaatcgaaaatataagtacctcttagctggccgtgcatcgctaagaaactttaattctcttccgtccaggtcctagagagaggttagctaattgcccaggctcattgaaagaaatattagcttacattccatgtagtgcatgtcgccttggtgctgtcttcggttggaaagcgcttcataactgttgtgtgtcgcattgcttcgtgggctaacacacacttccaacgcgaaggtgtcgtgacatcttcgtcttcgaggataggcacgatgactatcttgccgctatcaagggcttcttcgaccttgtagtgaagtgacagggctggatattaggttagtggtagaatcattatcgcggggggcacaaactcaccattcctcggatcagaagatacaatggcccccaccccaaataggtgagcaatctcatctcctcgaaggctctttggcacaaggtgggctgctttgatcgatttggcatcagtggatccaatcacgtggcagtgtccctcaaattcatccttagggatatcataatataaacaaacgtctctcttgaagttagaggcattgaagcttcgcccatactcatccctctctttcggtaccttcgcgccggcggacaacacctttgggcaaatagttgcggtatatgctctttccagaaattcgacgtcaagttctccttgtcgctgacgcttcacgggcggtagctcttcgagatcatcttgtatggctttgcgttgattcgaaaggaacttcaagtgatcagaagtacgtcgggcggatgtcatgagtggttttaacgcggtgataaattccgaggtggttatcttttcattgtcgagggcttcaagaagaccatcgtgagcacaagagatgtaatcgagatccattcggtagtctcgaatcttgccctccaggaactcggacacagatcttgtggtcgtcatctctctcgcctgcttcctgagaagagcccgctggcgatccagtggcataatagcgaatgcgttacgagggatatctggccgacggaacattttgctgtgtgatgagattcggtgaaactccagaggatgtattggaaccgaagcccaaagagaaagggctgagatagagatgaaattcaaactccaaaggaggttgaataagcgaaccgaggattggatccgaactccaaagagaacgggtgaccgaagtcgaaatagagaaccaatccctaaaggagaatggacaggtgaaccacggattcaagccgatttctaaaggaaaacgagagacagggattgaaacgagaccgatctctaaaggagaacgggaagaagagccaaggatcgaagccgatcttcaaagcagaacggggggcaaagatctaccgtcgctttcagtgttcagggcaaacggcagacggggcttgatgattatgcagttgatagattgtgcggatgaggatttgcttgaaggaaaagtcattcaggggggaagttgacgggtctcatctactcaaaggcggaaggaaccagactgatggtaatccacggtatgtaccttaggtaggtactgtaatagggaaaccgcgccacatcctgatgtgcgccaaaatgtccagaatggtagatttagcccccgatcacatagcatagagcatcaagcgtcctacatctctctcaaaaggattgtctatttcctattccggtcgtacaggggccctgtgtccttcctcatactccccgtcgtgcactgaacatccccgtcgtcttgtctgcgatgtcagaccgccgtcgcgctcttcctacttcactaggtaggtctcggcattcacgatttcccgaacgtttcctggcaaatagaaagtgatcatacttcgacatcgacagatgttctactccgcggctggttcttacggttggaaatctctatctcatacaagtggatctttcctccggcgtgcagcttatcagattatcatcagattatcatagtataccagaatcaagcaaaggaatgaaattaggtatataagaatattctctaaagagcggcaacccctccccccccaaaaaaagaaaacacaatagtacacaagaaaagcaaatattctgtcttcagtatgaggcagattctgtggtgctggaccttttctggggagaaagcgatttgtgggctcggcgaccaaccgacctcaaccattcacgccctctacgttggacttctgggctggcaaaaacgcgctgctggtggaaggcctgggcattttgcatgaactcttggatggcattgatgataccattgggctcatgctcgggcttattggcctccagcaacactgctaccaaatacttgaaagggcgcatgaagggcgggccctgatcggataggcgggagaaattgaaacagaggttgaatggcaaggctactgccatccatcgttggtcgaactcggactctgacatcgaggtcttcacctgaaattcaaccccctaggactgccaatcctatatgatgcacatctcgtttctgggcatcggaagctcatatatcgcaataagaaaatcggcgaggagtgccgcctcctacctgaaacgaatcatggagtagatcttagcctcggactcggggaatatgcctaactggtagaatctgaaaagagtacctccctaagccaccgctcggcctcgattccaatcccctcgataagtggcatggaacatcctcgccatctccttgattctgtactgcgcaatgagagcggttatgttctcgatgatctcgctgtccctagttgtgcggactccgccgactttgtttgggtcgctgactgtgaatgtggcatttccgggatcttggtttcgaagtgcgcgtatatcttccggcccagtgtacggatagggcttcatttgtttccaccgacactcaaagtgggctagcgggatgccggttcggcccgtccatgagtattcccatctatcatcctgggcactgaacgtgaaacactgcctgttgcctagccgtgtcacgctattttggcatgtatccaggacagattggcagaatgagttatagcttagggtttgctgatcattcggctcctcgggttgtaaactcagctggtcactagaattgctagattctcgagcatctaatagaggactcgtagcactcgaaagggtctggaattgggtgctcgcaaaaattgactcacaagtccgaccgacacttagtgaagcaccccacgcattagaaagtcctttgtgaagttcttcgtccggattagtatggagcccaccagctgctgtcatgctagtaatgtttaattccggagtcgtagcccatcctcccgagtaataagcggtagtaaccaaggtaacgcgggcaccgggttcaaggacggctttcagggcgaggatactgagtccctttgattcattgctatcgttcaaacagaggtggtaattggggagtccgtgacaaaatatgaggaggagtggggcgtcggttcgtttagctaagtcagaggctagcattgcctccagaaggaaacggtcaatcatttcattcgaccgaacgacagtcacaggggtcagttgatcttgatccagtatgtcacgatcaaggcaagttttgcgctcctcgtaaggattgctatgtagatatggcccatatttctggatcagcgcttgtcagccacgtctgcttctggccttgacctttgaggagatagttgaaggtgtagaagtcggagataaaccacccgtctcgcaatgggtgggcactgttgatagaagggtgcgttgtggcgaggatgatggtgttctcgtaaacacaaggtaccgttgaagaggtgaatgttgcaggcaggtcacttggggatcgcatatgtcctcctttgacgaggggctgttgctgtgttgagcctgccattgtaaagtgatgtcgaaagatatgcctatggtgaagttaggatcttatcactgagggtttcaaatacccaaattctagcatagcactagccacatcggggctttacttacttttcgagttctaccacccaagtaagaacgggcggcaaccagggaagaaaaccggactccaaaggagaacggcggtagacagggattgagatcgtcaaggagaagaaagactcggcaccatcgatagcttaggtcagctactcctgttggaagtaaaaatacgttataatacaccgtacttagcttagctaagaaggtgtgcacctttttggcgtagcggtcaagtacaggcgttttgttacgttgacaactctagcactggacgtccaccttttttgggacaggaacgataccggttgccactctgcattgaatcctttaaggcttgaagctcttggatcctttggtcatgcccatgaactaccgcgattgccgattcccgcgctaggatctcctgctcgagtgcctcctcgatctcgcagagggtactgggtggtgtgagatcaattgattggctcactgcggtatagctcgaagggggtcgggtcgtgaaactgcatttttttttccttttccctaatggcaattggtacaacccggtatcgagtggtgtagcccgacggcaacgacataggaagtgaaaggcccttgtaatagttcacacgaatcacattccacgttaacaggaatttgagtccccgttgactggaccgccgaaagcttcaattttggcagtcttggtcccgactgtatagtagaagtctgctctgcgtacgtacccctggttcatggtaaggtatgcggctctgtagtgtgtggagcagagtgtctaattattgacgaacctgtctcccacgagtctattggtgctgtagcgcagttcgcgcctaatatgcaggctggtcctggtcatctgtgattagcggggctgggtgtgtgttgggaaatgactccatttggaagggcgaagagtattctttgcggtccggctggataagtgagtaactaaacgcaaatggagatggtgaagaaaggtgtcatgtgtattgaagatcatgtggattgaagagtccaggggaacctcagcaaccttgatcatttcagaacttccgtcacatttcctctcttctcttcccctcttgtctcctagcatccttcaccatcccatccgcagcttttcatccactatccgttggtttttcatcaataattcgtcgccaacctctcttatcctgcaaagtctattggccttttggtctttggttctcctattatagccatatcagcatcatccccgcccgcgagtcaagacatattcaagtgcgatcggatactggaacccgcataagattcatagtgactatccagataacccttgacaaacgggccaatggctaatacgatacaagtttcaaggttcccctgccaagatggcgggacactacactgtaggcgcgccgatgaatgtcctatctgccgaagccggagcataactcattgagcctggtgtatgggcaacatacgcaaagcagcttccctggaaggtggcacggaccggtcaactcctcaaaacgacgcggtcaaattcctcaagaacgcagacaatctccacgagcctatgcaacgttccactaccaattatacgggtaaacggttggacgagaggatcagttctgaatccttgaaccttgagtcggtcttggtacagatcgtcggcacgttatctccctcatgaatgccagtcctgtctgaagcgtcacgggccatggggctcactgtatccggtacatggacgccgaggacagaatagggacggtatgtggaaaatgtcagtggaactgtaaagattgtcgatgcaagtcctcccagccccctctcggaggcgagatgtcacaaaaagttcaccgacgaggacgttcctctacatcttccctgggctcgcgacttggcatctcaattcacagcgcgttgttggcgacggaacggaacatcgcattggtgggactccaacacgcaggctgtgcagaacacttgttttggtgtaattcagactttgaagtagcgggaggagtgctttccgcacggcctcaaatgagataatgactggcatgatgttctgccgtcgtagctgtttgggaagtagggacatgtgaatgtgtccacggtagcgagttcttctttctcactccatgtatgatgtcccttccttgatggaactatcaatgtgacccattggattgagtttgtaaattaacagagaagataacgaggaaggagcaaaacaagacgtatgataaagaggaggataggagggatggcaggaaagggattaggaaacagattaagaaagaggactagcaagagagactaagagggcaggtgctctctgtgttctcagattgcacctcaagtctgatatcaagtcttcatacgaccgagaactatgcgatgagacgaaagtatgtctaaaacaaagcatgttttaagcttgaatgtcgaggacttgattgagagtaccgagaaccaggagagtgagagctagatataccgtatatacatactacttctagattctgagtacgggctcactcccactcacgacaaccgacgtggaaaatatcatgtctgattagagcatctgatcaaccaaatcaaagaagagagagagaattctggccactctgacgaggcaacgcccatcatctttgaaatacttcagaggtcgttctgacgaagaaagcaaacatgaagggggataagactagaactcttcaatgggctaggttggtcctcgaatataggcccagagcccaactgtcaatgggcttcgggctattttatccatagccagcccagcccgccgcccattgtcaggaacgtctgacatgtgcaaggtcaggtgtagggcagggcagagggacacatagtgcaggtgcagctgcagctgctatacttctcactgctcttcctttcttctcttcttcttcttccttctctagcttagtgttttcgtataaagaacacaaagttcctttttttctatgattgttttgccgagtctaacatcatgttttgctctctttaattttattagctgaaatgctgtgtagacatagatactactgtttatatctctagtattagcctgaactacaaattagaatcaagaaagaagaccctgaattacaaactattataaataattaaagacagacttcgaattctactaatagtataagagtagacctcgacaagtcccatgggactaaaaagattttggtcccaactcctggaccgtgctatatggaaagaccacgattttaatgcttaaaaccacatgaaatcatggcatttccgttgtcaccttgacttacaccatatcggatattggatgaaggaagatatattattggctatatgaaccagcgacggaatagcttcatttttgaactggtctataattcaggcatattaaggcatcaacctgaaaaaccagacatttaccctcggccgctctgccccttcgtagttgaatagatatttgactatcgcgattttattttcgttttcaattttagaattagtgagtttcgattatttgtggggttataccatgtttatgcgatccattacgttgatcttccgtcatccatgttgttggtataaacaggatctcacatcatgccaagattcatacaatataactgtacaaggactccggaatagtgatgtttgaaacttgattcctcggcctagtccggtcattatcagtcagaatgatgatcccgtcatacttctggatttagctttactttatacgcttgtgtgtatatccaaccatataccgataggttttttacgacaaagtaattgaataataatttacaggaccaatcctaatgatcctacgatataagcgacagagacattattattttgctgagcgaagtaaacgcgcttgaccatctcttcagtgcttaggtatcactgtcggggttcttacatcatcgagccctgggaacaagattcggagcatgatttgaaagagagggcagttttagaacgaatattcaatattttccggtttcctggcatggataaacgtcacattgaccggatcgaaatttcatagtctattttataaactcagccgccaatctgaccttcagtttgatctattttctctccacctcccacctctcaatcactgggatattaataacattgcgacctataacaacacgtgaaacacgactttccagcatgcaacaggaagtggaaaagccttcccggggccctcaatctcaattccaaaagggtaagctcatttacaattctgtctcattgtttcgggcttaacaaggaattcaggtcaccaaatccctattgagcaccacaaaaagcccggcttacaggctgagatggaagacccaaatcccacctcaagccaacttccaaccgaggatggcgggtatcagacctacaaagccgcagggaagcttgccgggaaaaaggccattatcacaggtggtgattcaggcattggtcgtgcagttgctattctattcgctatggagggagcctcgagtctaatcacttaccttcccgaggaagaaacagacgcacaagagactaaaaagcgagtagaggaaatcgggcaaagctgttattgctaccccactgaccttcgggataagaagaattgccaagcagtggttgatacagccctcaaaagctttggtggtatcgacatcctggttaacaacgctgggactcaaacgatgatcgacgatatcaaggatctagaagagcatgtatcttccgtcttatatcattaagtgtttttactaacatacgttcacaggtctcaatgggaaaccaccttcgacaccaatatccaccccgtcttctatctttcgaaatatacaattcctcatctgaaaagcggctcgaccataatcaactgtgcatcggttaaccactacattggtcgccctgatctactcgactacacgtcaacaaagggcgcaatcgtcgctttcactaggggtttatccaaccagcaagtcaaaaacggcattcgggtgaattgcgtgtgtcctgggccaggtaaatcgaatctcccacagaaatatttccgcaacagctaatctgggtatagtttggacacctcttattccagcaactatgactaccgccgcagaggaggagttcagcggcacaccgatgggtcgcccaggacaacccagtgaggttgccacatgtttcgttttccttgcgagccaggatagtagctttatctctgggcagagtctgcaccccaacgggggagtagttgtcaacggatgaacggtagatagaggctggcgtcaattaatatctgaatttcaatccggagcctcgaacgggcatgacatagttcgtattttggttgcgtgatgtcgtgaagggagatggatcaaaaaaagatattatttatagcatatttcgtttcgataagtaaactagtactagtccgttcagacaaatgatagccccaaaaattctatcatatagcgccgggcatacataagtggctacctcagattagctcaattttattggattctataactgcagtcttgtcgccttacttcacagagactgttggaatgataggcacatcagcacattcgacttgaacaacatgatgctcaaacctcccgtcagaagccccaattacaaccgcacttaattgatggccgtataaacacgccgagtccagtccaattgcataactgcttagctgcaactggcgctttgcatcatgcccgaatatcaccatagtcttggatgctagcctatcttggcaccggttccattccataacccagctttcttctccgggaagttcagccggtacgaatacatcctcgtcacctgatttacggataaggctccgcatatgcattacagcgtgtggatcctggtcttcaagtgggatgccaggaacgaggccagcatgtacgacaattagagtgtcaccgaagcaggatgttaggacatgaggtagcttgacgcgcaatatcaatggcaaagtggcaagccagtcgagatgacgcgtcgaaagtaccgaggccgtactgtgcgatgtggcaggtacgcatttgtcggcgatctcacaatctcggatattatttccgggtagctccgcgtcgggattttcaggtacgaccggatcgtcagccacgcccctagagtgcagtagcgtatcccttgtggcgttgaccttgatctccgcagccgcattaagaactgcattttcgtggttgcctctcacggcgctagcgccaagcttcatggccagatcaacaacaccaggactatcggggcctttattgacgaggtcgccaactagtatcagatgatctcccttgtgtttgtcgaaatcgaccttgtctaagagtgcctcaagggactttttcatcccgtgcacatcgcctacaatgatcaaacggccactgacagaaccattttcagatgatgggagaggttgcagaataaggttggtcggcaggtctgaaataaaggttgtgattgggaatatcttgtcggaagattttgtggccattattgtagacctgaagcataagaaagaagacagagacattaaggcccgtccacgggtctgtgtgttttatttacataataacccaatatagactagcgtagcttagtgtacatgtcaccaagatatatattcagaacaaattcatagagtcactggagtatgtcggcaacagaggaagtgtttccccacgaagcttggagggaaatgagtcagtttctcctgtgtgaaagaattttcacctccgtggatcacattaattacatgaacctcggtagaagacaagaatataatgaaagagaataagagaatatgttgttaggccataataatatactatggatagtaatgtatggatagaaatctcatgggagaaaaggttagaagaattcccgtcagatcatgagaatggaaatgggaagaggtctggtcctatgggtcccaatttggcgagatccagctacgaataagaagaagggagcttcagttggcaaacaaaagagtgtatggagttagatacatgcatagaagataataattattgcgatacactgagtagtcaaaaaaacaaaaaagacacctttgctcaaatgtaaatctgttcttcgatctagatcaagaacaaacattcacttcgaggaatttgcaaatctatcgaagatagatttagtttccctggggggcgggcttgccatctttgacatccttgggattcttgccatccttggggggaggggggacctggtcccgcttgccgctgtccttgatgtctttggggtgcttagcatccttgggaggagggggaacttggtcccgcttgccgctgtccttgatatctttggggtgcttggcgtccttgggaggagggggaacctggtcccgcttgtcattgtcattgtcgccatgagccgggggcagagcaacttcagctgcagtaggctccgggagggggttgccctggacatcggtagggcctgaaaatagtgttaataaaactctcagcctaggaatgggttacatgtgccggtgtacatacgctcattggggggagcaccggcaacgaggccagcggccatcagagtagcgagaatagaggtgaccttcatattggcagttggagatttgttgtagaaagaaaggattgaaagtgtctttggtttggaagtgtttggaagtgtttggatgagagtgatgatgaatggaagacagtgtccaggaccgcctctttatacctttaaactcgagggaacccccttaatgttttgactgagctcaactttgtcacgacattggaggaaggaataacgatcggattgacgcgtcatggtcgtcaaggctggtctggaatatgattctattaaaaaagccaaaagcgaatactgcagtagcttggcctaggctgcaactacttctggttagacttggatcttgagatccgtagtttgtctctagagctttatgtggcctccttttatggggtccaaagaagggatataacagacctcaggctctggtattatacggtgtatacagagtgcatatagaattactctacgaggccatagtgaatatggaagcttttcataacagagaattgagatcatagaatgtctctgaatcaataatgttaatctcattactccgtactggtcgatgttctaagttgaggtttgagatcgaggatgatcaccatcgggtaagctccccgaagccctaagagaaagaatgaggcaactatggagcaacatggctgatccctagctaatgcgcctatttttaagaattttacatcatccatcttattcaagtttcattggacaatcgaagagctttctccagggctgagatgatgtgttccccacgtacacgcggcctccgcaaatcccagccacgcttcactcctcagtgctccatcgaacttgtcatttcacataccacattgaatttatggttcttcgtagctcaacgtatccgaaaaccatagctcttttaccctcagtttgaagctctgtatgagcaaatccatgagaaaggctacgttgcttgctgtattattcggaagcccctgagcctcatttccatagatggagacggtgagtatgttgacatggctgacagatgttgagatccaaatgcttccccacaggcccggctccattgaaatcgaattagggttgaccaaatttagaactgccgaatttccgaatttccgcttattacgcaatgatcgcccaaaatgatcgccatggctttttctccattgttcagaaccatctgcttccggttagccaatcaaggtccagagattcatggtggggcgggagatcgacgagcttatacgtacacagtttgacgcaattacctatgatgggacgaacgtatgggtaacgcaaaaggggcttgcttagttgactgtcggtgatttacttctgcttctcattcgctccccgtaaatgcttgttttctccaagcattgctgcctaatccatcaccactctagaagtcttgctgttggatgttaagccaaattttctgctaaatcaatgttttgcatgagcgcttctatgtaaaccacaaaaccaattccaaggggtgaacattaattccacaggtttcattgacccggaacgaaaattttgataccatcacgcatatgctcaaaattgcgcaggcaactcttcactctcccctttcaaattcccccttaccgcggtgaacctgggccctcctaaatgtagttctagaccacgtatggtatgcttgcactattggccctagaccttgggacattctcagtcaggaaaaagacttcatccttactccacttaactgaatcgaggctagcaccatgctcagtcctcacattttcgtacaaactaaaagcctacaagtacaaagtcgattttttcgttgttcgtagtgtcaaaatgagtatggctattgtgtcatcgcctatcccacgtcacatcagagtctagtctgacatttttggtagatgatctactaaacatggcacccacatgacccatacccatactcagaaatacacagctctttacatttctctcatgttgccaacatatctttactggatgatgctcctcgagtcttccaagaacggctctcggcaagtttggttatatgacgatctggaaggcgaccgcacctgccctacctgcacctgcctttctgtatctcccagttatggaagtaaccgctcctttcatgaacgtaagcgaaagcaagcgggctaaattcgtcatttgcgtggtttgttgaaagctctcgcacaaaaccatgagatcaggaccgataaatagttttctccttcctttcctttcctttctatacttagtattccgcctgaataaagactttcttcttacaaagcctggtccgtgacaggttacgtttataaaacaaaactcctgtgaaggggcaaggtcatctgcatgtcgtatttcctgccactaataccaaggaggaagtggagaagcttacagagacgattcgtaagtaggcgcaagagctgcttgatatcgaataaacgtggtggtagaatacccactgctgtatggcaggtggaagctcagtaggccgtagcggaagtgaatggaaatcgcgtatgaacctaggaaaacatcacagcttttccaactatctaggaaagtcattatttggtgaagactacgctgctttttagataaatggaaaagaaggcgcaacctttaaattcattgctttggacatgattcccgttcaacgttgaagagataaaaaatatattgttcattcagtaacgaagacataatttctttctattattaagaaccttcactatattccagccgagagacttgtaaattgctctgtattcactcattccgtaaatcaaattctagagttgctatcggcatcgaagatggccactgcatttgcgggaatgaaaggaacatgcagcaagcatgcaacgtgactacaagggcttcaggtttcgagtcggttgtgcaggtcggtaattttataatatagagcgaatttataatattgcttgggaccatgggtttggtaccagcacctcggcacgtagttttgatcaacaacactcacagtttcttcccttcttctgaacattcacatcaataatctagcctgacacagttcaaatgcagtgagcattcccagctgcagcgtaccttttgtgtccacattggcaacaggctaatgaccccacgtaagtttgaaatctctctgtgtagaataagcttcagaagatatatatattccccgacccaccagcatgatcatcgagccccatttgtgacattgtgtagattccatcttgaaaggatctaagtcataaagctatttaaagacactgaatcgaaaaagaacataagataaccacacactctatggtactttttatctctgccttagcgtactttagttattgttggacatagtggtcacctgaccatcagcccggtgcggcaggcaccaacccccataactagatagtcgggcattctgcccctttaggccacattggcaacaggctaatgaccccacgtaagtttgaaatctctctgtgtagaataagcttcagaagatatatatattccccgacccaccagcatgatcatcgagccccatttgtgacattgtgtagattccatcttgaaaggatctaagtcataaagctatttaaagacactgaatcgaaaaagaacataagataaccacacactctatggtactttttatctctgccttagcgtactttagttattgttggacatagtggtcacctgaccatcagcccggtgcggcaggcaccaacccccataactagatagtcgggcattctgccctttaggaattgacaactctctccctctatcattttccatcactacactgtagtcgcatcagttatccatccatggctcacatgaccgcttagtcatcccgctctctgtcgatctcccgaatctctccaaagtccacttcccatccactcaaactcttttcctgtttggacccccatctggatgcttgcagggagataacgcagcagtgcataacgacaaggactatatcgcgccatttcttatcgcgtgaattggtggatgtaacaatgggagacacccctggagattgattacaaatccacctcattaccaatcacttcgaacagcccttgactatgtgtacatttgtagcctttttctctcaaagggagaacttcgagtatcagccttcgatttatccaaaagaataatacccgaagaatttcctcaccaatagaaaccacaccaccaaacacgaaagaatgctccgaccagtcatcttcaggagatgatctcaaagctccgtctcagtcccagtatctagcacaatctcaatcccaatctgaatgtgactgtacagagaaaatacatgcatcggatacgttgccaccaaccgaccccgaaacagggcaacggaaccggaagccaaaacctctgtcattctatcttgcatttatagctttgctattgatggtcttcttggtgtccctggatgccaccatgttggccgttgcaatcccggtaattcgataacaactccttcaattcaaacggccattgagttcacctaacccttcctctctataggccatcaccgatgaacttttcggcacgaccttgaccgcgttttgggccaacatctccttcacagtagcagtcgtggttatccagcccatctatatcagtttctcagatatctgctgtcgtaagatccctctttacgcggcttttgcccttttcggtattggatcgattgtcttgccgtcgcgaaaaacatggcagttctgattgtgggacgtgttctacaaggactgggcggaggcggactcgacgtcctaagtgaggtcattgtcgccgatatcactactctgcaggagagggctgtgtatattgggttactgtcgcttccaatggcgacagggtgcatcgcgggtcctattctcggtgcagtctttagtgagtttgttacgtggagatggatcggctggattaatctgcctatagtcggcattgccctcttcctggctattttctttatgcgcctaagaccaattgaccagtcccttcgctcccagcttgggcgtatcgactggcttggaatgctactatttacggccggttgtgttctgttcgccctaccactcagttgggctgggaatatgtacacctggggatcgtttcgaacgattgttccgcttatcattggtgttttgattttggtgggatttgcattttacgagggttatcagaccgacgctgtcttccgctaccgtatcttccgttccagaacggcacaaatgtctctgcttggaagcttcatccatggcttcgtgctttatactcttctgcaatatcttccactgtttttccaagcggtctacctcgaatcaccgttgaaatcttctatctcaatcttaccattctgctgtgtggtatttgtctttaccggaattgccgccttcgccgttgacttctttcggagatacatatgggagatttgggctggatgggttttcctcgccgttggctgtggtatcttctcactgtgggatcgatcttcttcagtagccatgactgctggcttccagtgattgcggggatcggcattggcacaatcttcagcgtccctcccatcccaatgcaagccagcgctgcacccgatgaccagggtctcgcaatgggaataatggtcgcgttcaggctattcggtgctcttattggtcttgcagttgatgccactacattcagcagtgtcttcgccaacaggattagcggtatcgatttacctgcttctttggcattgttgaaagaccccagtgaggccgtaagcttcattccctatttacgaacagccgatatctctcctgatctgcgggacctcattcgaggttcatataaggacgccatgcagacaatctggtatgaagtggccgcttttggagcattgggtttcttgagctctctattcgtggaggaattgactatggagacggaagagttgggtcggcagcatttcgagcatgagtcagaatgaattgaaatccacttttggaagattagatggtagagcgggtgaacctgaggtggatgtggaaacgggaattgccctgggaagtgtaaccaaaggggcatagcgcgttttatcaaattgtggccttaatgcctgaaattcggcctgagtttcgaccgcttttaggcatctatttacagccggcacggaataaccagtcccgatgaccccgtgaatataaagcttttggcggcatcctttttttcagggcatgaagcaatttaaattaattctagcaccacgaatgagagagataattcaatttcgaaaacggaaatttaatgcaagatggtggattatggctaattgactaaatacgacccgtacggagtacttaatgccagttatggtacggggtagattcatgtggaatggaactctcttcatattgccagatcaggtgatctttgaatagcttcatagagatcttaatatgcaacaccaacagtttgcccagtctttctattatacgaattgcaggaaccgtaatagtcaaaccaagttgacatatagctatgacttccttcgaaacgctcaggtccagtgtcatatccagggatcacaacaccaccattcaatctctattttcgaatcgctgacgagattaccctggggtgggaatgtcgcccctatcatctgccagacaatcgggttgcaaaggcctggaactttgcgttgaatgatctgaggtttccgtacgctaatgattgttttgtgatacttccaagctggctgcccgccgcgtctatctagcctcggctctgaaatagtgggttttaatgactcacaaaaggcatggttagttaggtcagaaatacacatactttcaagaataaaatcttctttgcctattcctatgattcccaggtcttttatgtcagaaatggaggtggtagcggcaaagaattgacccgagccaacttagaggtctagttagataggaaatataaaattcgcatgttttcattgcaataacactggcttcgatcgatggagtgcactatatattttctttcatatcttaaccctttgttctagtctagtatgctcatatctgcatcctccctgccttttttccaattggtgatgatgttctgagtagctacttatttcgcacgtttttcgactagttgaagatcccaagtcgctaccagtgcgtgcgtcgagcgatatctgggccacagcgcgataccatacttcgaggcaaatgatagcgggcaaaacatgcagattcaagtaacgcagcgtctatatgttaagtaaaagtgcccaagttccccacccatgcgtagaaaccggatatgtaccaccttttacgcagatgaagatattttgtattggacttattgacatagtgcataatgcatgacctgtactgtggagtactggaggttgacgacggtctacattgtctatgacgaagtagatccttataagtaagcagcttgatcgacaggatctgcagtttagtgcgctagtcttcagcccagccacgaattccacacactctatccagccgagacacaaggtctagtggcgatatatctactccgaagtagttcataccgcacggaacggaccggctcgagcgggagattcaaaaatatcttccatattgacgtgactgtgcatgacttgctgtatgacccatcatactttcattcgttgtttatgtaggtcgcagtttgtttcgggcaaaccgggatcatcagtgtggttacgactccattagaaggctgatcgattccttatccgtagggtccagaggcaaagcgacttacatgtatagtgtgggtcgctgctgatgaaagccattggcctgagaggagggaagcttcacccattagtgagaggggtattgttggaatcgccagttatgaaaaggaagagtggtataagtatctggttatcccccgacgagttgatggtctgacagacatctcgagaaaggaagaaggacacaaggaaaacaccaatatgaatgaaccacgcaaagaaaacaatccccacaatgtcatcagctcgtacttcatcggacctaaatccgaaaatatgggcaacttccgagccaacattacagcgatcctagatcaaatcgaaaagacacgttctgattaccaacccgatgatgatgtgtgttccaacaccccataatagcacaatgcagatgaaagacgggtatagaaactgacaataacaggtctttatcaccgaggatgttcgaacctctccggagttccaacaaatcacccaaaatttccatgaagcagtcaagaaagctgtctcactcttgggaaaacattccattccattttggcatcctcgctatgagggtcacatgtgtacggacatgactatgccggggttactgggttatttcatgacgatgatctacaatcccaacaatgtcaccgtggaggctagtccgttcacgaccgtcatcgagctccgggctggaaagcagctatgcgatatgtttggatacaataccgattctaaaaaattggaaatgccgctgtcctggggccatatcacttgcgatggaacagtggctaatttggaatcgatctgggttggtaagcatacctactcactgtgatgccaaagactcggggattgaccaatgtacagctcggaatctgaagttctaccccctcacactctaccaagccatgaaggaaggtagccttggcttcattgctgatagcttctacgtcaccacttgtgtgggagaggagaagcttttcagggatctagggaactgggaacttttgaatcttcgatcggaggtcatcttgggtatgggagatgctctgtatcggcaatatggtatcacgtccaagttcctagagaatgccttgacaccgttcagcattcaaaccacagggaaggatgttttggagcgcgaattcaacattaccaagcccaccaagtacttcctggcccagacgagacactactcgtggcctaaaggcggaggtaattcttaacttttctgccctagagtgaccgattactgataaatccctagcgatcgccggaattggttcggccaatatgcagggtgtggagctagacatggacgggcatatctccatcgaagcgctggagcgagagctcgatcgatgtgtgaccgagcgtcaagccgtatacgccgtagtggccatcatcggatccacggaagaaggtgaagtggatccgttgtatgacattttggcaatgagacgtcgatttcaagacaaggggctgtcattcctggtgcacgccgatgcagcctggggcggatattttgccagcatgattccacgattttatatggccccgggaagagcaacgaagaggaaggatggagacaatgccgtcatcaacgttccttcgttgaccctgaaacccgataccgtcaagcatatgattgcactcaaagaggcagactctatcacggttgatccacacaaggcgggttatatcccctaccctgcgggcagtctctgctatcgggacggtcgcatgcgattcttggttacctggactagtccatacctcactcagggatcaatggaaaacatcggcgtatatggtgttgagggaagtaagcccggtgctgctgcgatggctgcatggctctcaaatcagactatcggattggatccaagaggatacgggatgctgttgggcgaagcagcctttaccagtgcacgggtaggattcccctttctgtctgtattacgatccgctttctaacccctgatagctatcggccttctacgcagctatgcacctaaagcaacccaaggaagatggcaaatcctactatgtcatcgttccattcaaccgactgccgatcgagaaagagggatacgacatcctgtcagaagaagcagaccaccggcgtgaacttatttgggaacatgttctgacgaaagataacgccaaagtcagcagcaacccccgcgcgatgaaatggcttcgggaaatcggctcagatctgaacatcaacgcattcgccctaaactggtaccatgccgatgggaccatcaacaccgaccttgaggaagcgaattacctgatgagacgagtagtcaaccgactatcgatcacaaggagtgacaaagaccccagtaaaatccccctcttcttgacctccacgcaattcgagcccgcattatatggcaaatgtgcgcagaacttcatgaaacgactacacctcgagccctgtgcacaagatctctgggttctgcgcaacgttgtaatgagtccgtttccgacagaacgtggcttcattcatcagctgatggagaaactggaggagaccattattgatgaagtcaagaactcatgccgcccgcgaaatagtcctacggcaaatactatcgagttcctattacgaggaacggatgaagtgttcctggagttccagacaaaattccatcgcgcaacccagcgtcaacagatcatcttggcggtggaactacggaaagatgtcaaaagtcaatacatcgcactgcgagaaaaattcccctgtgaagacatcggattcgcgtcgaatggtccgattcatctcgaaagcttaatgcttcaaatcaaggacgcgacccactctcgtccacaaatcgagggtgagatcggcctcgttgaagcaggatactactcacacacgatccgatgcaacgtgacgatgaaccgagtggtgaagagtcggggattgaactccaatttccgagacgatcattacccccgtaacttcatgccattctatctcttcggcacgaaagaacaacaccatatcacgcacatgctcctccaagcgccgaacatcaatctttcatctagtaacatccagctggacaaggagctccatgacaaagtagcgcctcgcctcggagagggagaaggtctcatcctagcgttgaccgattaccgcgaggaaacgatgcacccattcccgctagataacaatgaccgcgcgatcaatagcaagggattcttcttccgaagaggtcaaaccttcaacgtaaaggtgtatgttgaccccaagctggctacagccaatggacctgggttactggatgaattgtgcacgctggtcggccgtggtaaaatgacactcggggatgatgtgcatgtggacgtgactgtgttgaatgctgatccgtttgaggatgaggagccggatattcagtgggaagaggaattggaccatatcaccaacgtgttgaatagtggccagtagagcgatagattcctgggatgccggaggaattacaattgccaccgtgccatagagtggtcatccacgtctaaatataatatctcttggcgccaaaagcttcatgttcatggggtcgtcgggcccggttattccgtcccggaataatttacgtaaagcgatgctcccagttagttcaggccaactatcaggcattaaggcctcaatcaggcgaaaatgcgcgctattcagcaatgctaattgttactgagcctgtgccagaaacaaaatctacttgcaggccttataaatgtggcgagagctgagccctgtcatgccagaatactcatcgaaaacattagaaattcacgtaaattcatcgatcctcaatctaacctggtatatcccaaatgtaagtctatatccacgggcctgggaaaacctttctatatacaaaacccaaacacctaagccttgagagtatacacaacacgaccacgtgagtctgtacccttgagcacaatctcatcgccagtgctggagacaacacggcgctgatccccattatgtagaacaatatctaaatccttccaagcaggagtaaagccagcctcgtcacgctcaaacttaacaagtaccttctcctcggttgagctgtaggtaatcgtgtatgcagcagtgccgggttggacggagataccatcatcttcataccaagtggtagcaaagacagtaccgtgcgaagttcccttgggcgggaacacttccacaccacggtaatcgtcgacatcttggacggccactgatgcagcggtctcatcaccaggaacacgggtgtgcacgctcttgccgacagggatggcaccgccgacacgggcaatgaggggaatgctcttctgccattccgacgagatcttggcccactgtccagatgcgaggtactggtacggagcgttcatgttgacgtagccatagtcaaagacgctgccggactttcggggcaggtagacgttcgcgacatcaataccggctttgtagacgccaccaacgagcacggtctccccgaaccagaactgttcctcgcctgacttgagtgcttttgtccacacctcgggatcagactcgtaaccccaaccggtccagcgctgtggcggtgttgcgaatttgtggctctccagaccgagggagtagatgtagggcagcatttcgtaacgacgcttgatggtggcgcggacctgaggtgtgatctcagggtacataaagggctcgatgacatcgccgacgtcagagtccttgggagaagtcttgaagcagttgattgcgaagcggggagcgtggcagcctatttgaatccagcggaggaggagctccggggagggctgggggccttcgaatccaccaatgtcgtgtccttcgcattggagaagggacatgccggcgtttagagacagggcgttggcacccttcatgttttcccagcttgtaacgttgtcgccgctccaggaggatgcggcgtaacggagggttgatttttattatacgatctaagacaaggcgcacctttggcaagtggatcgggctaccttgttcgatgcagtgcagtcctcgttaagggaagccctatctgccagcaacgtgtacaacaacgaatacggacttttaagagatcagtataagcatttttatttcttagagattggagttagaaggataaggccgttttgggaagcatgctgaaaatctgctccgatggagatttgaggcgcacggaaaccaagctctgactctaattgtggctcgtattttggcccccaacctactattcgggtgtggatctagcgcagctcgcactagactccacaatacgcccagcatcaccaggcctcggtcttgagttggcctgtcaatcctgggatggcctgtgctttcagtggttagaattggggtttgcaattgagcaaggtgcatagccaccgtcgctccgaaagttcgctatcttgagggtagatcccaaggaaagaaattgagagcttgaggcataatggaaaaagccaggaacgattgtttcggtctcgcctgaaaaagatctcggtcctcttgtatacctctccgctatcttgcagtcgattgaatactagttaccacataacttgcccgaaggtggagagcaatttccacattatccctatcgaggaaaccgccaactagctgttcgtggaatcacggaaatctggccgctggattagtgtatcacaagatacttgtctcagtctgaactgattttttgcctattgccacttttcgagtgaagagccaaaataacgtagaacataatcgcaaatgcaacagatgaagcgaagttgatatcttacagctgcgtatttcgtataacttcatatctaaatccaatccttcacattcctggccctaacgtaggagtacttattatttcgctggctaaatcctcggaggcttatgctccaattccgggagaggagacttcgatatcaatttattttagtggatatatgctactttcttagcggcattagtttgtcgcttacgctctaccaagaggagaagtcgtggatataaaaggcgttcaagatcctcccaaagctgatgaaaacgtccttcaaaattagagaccctttcctttgagacaagcatatcacttctccctcggcgaatccttcgtccttgttttagtgtacttttcttcatcatgaagcttccaattcccattgctttcgctaccctcttggcctttgcccaagctgctccatcgggccccggagaatctcgcttggaagcacgagcttctgtcaacgactgcggagactcgaccttcataaatcaaagcagtggtggttctccacttgtggctgactgccagcatcttgctaggaatattgctggcggcggcacctggagagtcactgccaccggcggccagcaccagctagctcagtatggcacctgcgcttttggtatccaaggccacaaagacatggatactgcacacgttggcaatcaggacattatcgacctcatcaactcttccatcgccaagttcaactggaacggaaaagtcggtgcgaagggcgatatgttatgtcagggcgagaaggggctcatgggtaagcccaagatgacgtggggtatctatcatacttgagctatagcagtgcgatcgatggcaggtttatttgtaagttgctctgggatctcatgtgtcctatatacggagaattgggcgctaatcacatcttgaaggcatttcatgatcgagacaagcatattattgtgtcacatgcattttcaggccatgccatgctcagttcagtgtacttaaatagtggaaatatcggagggactgtctgattcaatctatcttacgtatattcgaaactgcgccttaccgtagaaatgtggttattacagatcttagacacttgttgcatgttgactgaaatgcggcatagttttatcacgtgtatccaatcttgtcttatttggctgttcatgatattgagtgtggcacaaaaaacataccgctccggaaagctcgtttcggtaatacacccctaacataatcgcgccggctataacgccctttttaccacagtcgcaagaagttgctcgctaaagtcgcccagctcgaaaggttgagagaacaccacccaatcagcacctacttcgaggtgccattaccagccctcgtcgccctcaaaaaagccatgttcaagcttgaaaacatttggaccctatcccacaaagggtgaggtgaatgaaacgtttgaaatcgcgacagctccccgtatttagataaaagattgttagagtagtctatagatacttttccacttagactaaatatcatatctagctattttagggggtttggagaactttgctaatttgatgactgattagggcgatgtaattcccagtaccacaataacgcaagttttcgatttcttcgaaataggtatagtatactaaaaattcttatcgatacctctctgacaataatggattagatcaagttgtggtggttgacgtacaacgctatattctatcgcatttacgatgtgtttcgcagatgtcggtcgcctggagtgggtggcttggcttggctgtcttgggtggcgctgcgggtcaggacgaagggacgcagcttgggctccatgtcctgcagggcatcgtgggaagatttgcccatcaactcggtatggagggcacgaccccaaagaccgacggagttcttgacgtttttcgctgcggcatcggcgacagtgggctcattgagggacatggtccaatcatcgtcgggtagggtgtattcgttgttgtcgttccacataccatcaatgccaaccttttggaggctctggacaccgtcgtaccaccacttgaaggcctccgctgaggtgaagtctatgtgggcaccatcgccaccggtggcaccgccagcactccacagacgcatgtatccaggctggttttcggcatccttaaagaagccaccggcatcaacgagcttctggaagtcggggtgagaagccaacagaaaaggcttaatgttggtgagaagtcggataccgtactggtgcattttggcaatccagtcctggggatccgggaagcgttctcggttccatgtaaagacattgcgaaccttgggctcggtctcagcaatggaatagcccgaactcatctggtgagccgagcagggaattccatgttgcttaagcttctccgcaaactccagaagggccaaatgagccttctgcggctcatctagcatggtgtacttgtagccaccggagatatagccgtaggcccagcgggggaccagaatggggaagccaaccaactcggcatacgagcggacaacatccttgatggtcttgccaacaatgtagtattgctcaataccgccatggtcctggcggtacaccttgaagtgtccccagagcccatcgatctcggctcccacagaccacagaccgcggctatgggtggtcgagaagatggccacacatccctctgcagaagccttgatcagaagcgggatgtgcttgtagaggggatccgtattgtatacatcatatccaaaagagtcggtggccgatagttggaattgacgaccagtcaaatccatgggagctgccttctcgccgagtccgacatggaggcattcgcggtcatgaactgaatagttggcgacaccctcgccgtctacaatgtatgatcgcagcggcaaatccttgtgcagaggcttttcggagccgatccatgacagtttgaccacaggggtgtattcccagtctatggaagcagtgacaccggcgacatcgattgttttggaggagggaccctccttggtgaagacattggcgccctggaggttgatctcgggcttggtgacactcggatagggagggatagggtgctctgtggaggcgaaagtggctcggaatagattgggacgaatagcttcaaaagtgaaatcaaaagcactcttgctctttgtgctgcttcggaggtggacggaagcttcttgatcagtggcttgtggcacttgcgaatagcccttggggcagacttctctttgaggcatgatgaatgtgaaagacaatgcaattgattcggaggaactggagagaataccaggatatgccctgacatagtggtgtatttgaatgctagtcgagctcccctcagtcccatcgtttcatgtaccccacggtggtacgaatgatgcattgtagctgtgtagaatcggaatccggagataatccccgagaagcggagacgcgacggttgagtgggaaaggaagggcaggttccgggattaattttgccgcaaacctccgcatttcccccacaaagaacgtccggggaggccccacattagtttttctctcggctttgcgcaccgaaacccgatattaacgattttcggcacttctcatgactcctcttcctccatcgcccctcccatagaatttgcctcagggaagtgattggataatacatcccgacgtcggccgcgtgtatcgtgtcttgccgtttctctccaggtcaactgaccgcgtggactatacaaatttttatcgccaactatgccaagggctaaaaaggaagaaaactatgttgtacgtggtgtgacacttcgggtttggctctcttctccggggaatgtaatatagttccttccccacggggttgtgcatacaggctgtactacatatatctcaggtttacgtattttgtcttcccctattcagcttgattcattgtctttttatacctacttggtcttttattatttcccaccgtgtctctgcgagtgattagctatgtcgcaggagtcaacttcacaggcaaagaaccagcgggaggagttcgtggagaccattgaccccgagctgtcacaagctgtgcctcctcaaaataatggcacaggaagtcagcccaaaggagatcatgctttgcaacttattgaagaggcagggcactcaaccatcctaacccctgagaacaacgccaaagttcttcgaaagatcgatttgcgtgtgcttcccattctccttggaatctacttccttcagcaactcgataagtcaaccatctcgtacgcctcggtgttcggaatcgttgagaaagcccatctccatggccagcaatactcttggctggggggttcgatctatctggcgcagctggtgttccaacccctggttgcctatgttctggttaaagtgcccctaggaaagtttctggccgtgtcctgcctgctatggggtattgctttaacatgcatgactgcagctacaacttttggagagctgcttgcttgccgaatcttccttggtatctttgaagctggaattggttcgttgtctcctgataatacctagccatccctactaacgatgagctttatcagcacccgcgtttattgcagtcactcaaatgtggtaccggcgtcgtgagcagcctgtgaggttgagttcgtggtatgcgatgaacggaatcgtgaatatggtgagttccctcccatattgtcctcgtgacacttatattaacgctgaaggaaagtttggaagcttgattgcctttggactaggtcacatcaattcctctatatttgcgccttaccaggtgagctataatacataattgcctgtcgaggtattaacatctaacaccgactagatcatcttcctctttttcggcctagttacggttgggttctctgctgttgtcctgtaagttttgaccatgttccccttttcgccgtattatactaagataatcttgcttagtgttttcatgcccgattcccccgtgtccgccaagttcctcggagaggaggacaaacttctatctattgaaagacaacgaatgaatcaacagggtgttgagagccaagagtggaaatgggaccacgcaaaagaagcaatcctcgatcccaagtcatggttctggtttgcgttaatgttctctatttcgtgagtgagctcaaatcgtacaaatcactgcactaagattgctaaccactcatcagtgttccaagtggcggcatcactactttcgggcccttgattatcaaatcctttggcctcagccaatatgatactatgcttttcaacattcccttcggtgcagtgcagcttgtcgccacaatgggaggagcttggctagcaaccatttggaaaatgaagagtccagtcttggcattgctctgtctcccacccatcgcgggttgtgtgatgctattacagattacgcacgacaatgcccacaaagggcctctacttgcaggatactatattgtaagtgttgaattgaaacgaaacatcactgtggaatgaagctaatcgatttcatctagatctctgtgtacccagccatcagtaagcgtttacctcattccgggatttaagcccagctaaccatctctagcacctttaatatactcttggtctgcaggaaacacagcaggagaaacaaaaaaaaaggttacaaccgctatcctgtatgtcgggcagtgcgctggtaatgtatgtaacactgtaagccgtcacatcgggttttcgtgctgacatatgtcttacctaggtccttggaccgaacctatataccacaaatgaagcaccgctttatcgtcgtggtctgctttctaagtaagtttatcaacgcacaagtttttgtgcgtcaaatatctaacgcacgcccagtctcgcgatgttttgtgtcttgataggtctcaccgggtaggttttaaccaacttcgagtgatcattctttctaattacgaattattagggcaaacaccacatatctgtacttcctgaacaagcagcatgagaagagacgtgtgtctctcggcaaggacgctaagattgtagaccagtcgatgcaagccattcaagctgtctccgacgatgccaaggaggatttgcctcaacaagcagcaaatgacaatgcctggaaagatctcactgacttgcaaaatgaggactttgtctatgtcttctaaggtggcaagtttaattagtctgtgttatagtgggaacatctgatttcgcattatttgatatagcacctttgtattgattaaatgtaaattggaatataatatgtttataattacagtcaaaagcaagaaccaccaaagtctccttaaattagagcttttcctttgctgaactatttcgttgtgggacctggttgattgtatagccggctcggagaaaaacccgaaccccgcgtttctccaggttttccccttcccgtcaaccccgacaatcatcagtgcgagcagaagacggctggctctacatggctgatcagtctgaatgtagcccgtacagtacggtgatagaggatgaatccttgcaccttattccagcgccaacggggaaaaaacgcattccggtacgtcgctattcggattaggaccccacaacagcggacgaagcctaacaatgcatggcgtttttggtgcatagaaagcctgcagtgcttgtcgacaatcgaaggtcagtgcccaggcctcccgagcctgcatattgtggggttttgactgatcctttcaaggtaaaatgcgacggagagagaccatgtacaaggtggttatattccagatttacatgaagcttaaagcttatcctgataaatcagatgtcaaaaattagaaaagcaatgcgtgttcttcgaaataccgaaagaccccgtctcagagtacgaagtgtcctaaggtgttatcaaccaagactaacatcatccaggcggatcgaaggcgtcgagtccgaagttcaatatctccgaaaacagctagatcagatgcgcgagttgtttcaacagagccgttcacagcccaccccaaagtcccaactaacacactccccaagccacctctgtgataggcaacaggatgtgcctcgcgagagcgcttgtggctctcgttttcctcattcacaggatcaccctgaaggtttattcccacatatacctgtcactggctccgctaggtatacaaattgccaccaataccaaaggtctatgtcggggaccatacaaacgctctctccaaatgagacatcgactcagcctccctacgcgcgcagtcagataattactagaccacccaaaagaaaacggtctgggtttgagattcgagatgagcctattgcggactttattgataaaggcctcatcacgcttgaatgtgctgtttcatacttcaatacgtatgtatgatccgggagttattcggggattaattatgttttactgacttgagagatttcagcttctttgcaggatgtgtatgtatcaacccttattgccatactttaaatcctcatgtttcgtgaattatacaggacaggtatatcccgatcttcgaccctcaatacgacacctttgactcggtccgatctcgaagtagtatccttctcaacgcaatttgtaccattggctgcatggtcgaaactagtgaatgcccacccctggtatattttgtacagtactattgtactaaacagtttcttccaggatctggaggtggttcaatgtccgacgttctccacgccgaactcaagaaatggatcaacgtcataatccagaacaaacaattaaactgccgagaatcaattcaagcaatgctcgtagttgcttgttattccgcagaacgctcactaatcttatcctttgccactcgcatggccctggatctggaattggatgaggcctttgatgaattaacccggcggcttgctcttcagaacgaagatatggcttacgccttgccacatcaaatgtttgaagaggagagagcccttatgtggaatgctcggacgtggttcgggcttttggttctcgagcatatgtaagatgagcttggcttatttttatgggttactaggctaatcatatgcaatgtagattccgacttgacggaggaaaaccacctggcattcggctaaaggggaactcccgccgctgtcgggttttacttagccatccatggtcgactattttggatttacgtttgttctctcaggttgaggtatgtggggtatctaaaacagacttgaagaagtattaatctttcttagttaaatattctcagaggtatgacctttcggtggatttagatgcaatgactaatttaccttctatagccaatgtcggtgatgccctaggaggaaacacatcgctcgatgggcaaagcatcgcggattacgtgcatgatatgaaaatcgagctagatttgtggttcgagtaagttttccagttttaccgtatcctaaaaaacccgctaaccccgggcagtgactggttacgcattatcggtataaaatcagatgaaataatgcgctgaaactttctaacaattcgaagaaggttgtgtcgccgccgccgaagagaagccgtcgctactagtcgcccttcgggtacagaaatgctggaccgaaatgatgcttaactgcaaagcattacgatccatgggtgttgagaacgtagcgtgagtactactctagaagaacatatgcctccatctgttttaacacaaacgtgaagtgccatgtccaccacggaaagaacaatcctcctcacagccaaagcaagtgcacgccgccatcttcgcctcataattgccgatccagacttctacctcgccaaactgaaatatgcaatggattttgtctgggccaagtgcgcgttctccttcctattgcttctcaaattatcccgtctgatccctgagcgcgacgaggagcaccaagagctgctggaacaaggtaaccgactcgtcgatgagctgagtaaagctggagctagtggaactcagtccggtgctgggaatatttatcttcaaatcttgaaggtcagtattgagaagtacgggcgtgcattgatggaggcccagcaacccagctcagatgggcccacggatacgtcgccgttctgggagttgtttgatgcccaagcggatctccaatggtttgtccctgagcagtttgtctccgagtgggactttccggggctcaatttgttctatttccctactgcttggcaggattcccttggggacttttcgttggctatgtaattctataaattaaatcttaacctcacgactgctcaacgtcggatatagttacagaattctatcaatcttgaactatctactgttgctgtagtccttggtattatatatacatgggtttggaagacatattttcatcaaaacaaaagaaaagatctattaccgttccacagaaacagtatactcgacatccttccgaataatcatcctcgtactcacatcgctgccactacgctcactgctcctgtcctcctcggacctcccctccccagaatgcgacggccctgaagcctcacaaacgaccgtcctattctccgtcccatcgcccaagtgcggcctctccttgaacaaaccactcacctgacgggagggtcttccctttacattgcccatctcgtaatcccgcgaccgcccagaagcgtaggggtctgtatttacacgtctcctagacccagaaccgtatccatagccgccgctgctactaccaaggtttgagtcgccggccgtgccgtagtgggtactgagggcattcatgaaggggcgcagacagaataccgtgcatgctatcagggcgtagttgaggtggagctgggtgaagactgtgtggctgattgcggtgaaggtggggtttttcacgattgtgtattccttcagtttggcgagatggatggcggagaatactattaatctatcgtttgaattttgttagttccatatattagattgtgggaagtggaagagggacgtacggtagcctcgccgcgaaggacaccataatcacgattttatgtgtgatttgcatctgcagaccccagattagggcgatacagaaggcaaaaagtaatagttcggtcaaaatgtcgagcgcggtgattgcttgccagcgggggaacttgtcatcgttagtatatccgattctacgtctgtatattccgttcgcggtggtttttcaagtagacataccaggttatggcattgctcgccaggtataacccacggcttgtttccctcgcagttcactgcgataagcagtatcgatactataatccccactgtgctaagcacgaacgtcgcccagagaatactcttgtggtgcttgcggggcgtcaggcgcaagtagatggcaatgatgcagcatttggagaggtacagggttatgaggtagaggatgtcggcggcgaggagggactatgctgttagtgtatacaattgaatgggacattgggtaatgcgaacattttgtatgcgatcaacggccttctcggtgagtagcaatatgtccgtcccaaagccgatgctcgcggcgtggaagatgactattgactcgataattgcggatatctattcccgttagccccatttacggaatatgccagtttctttccatgcgtacggtcgctcccaaaaggatgatatcgtctgatccccacggtggactgaggaatgtccgcacatacacccggatcagcagacagaccagcgaaatcactaggcatatggcagcggtaatgataataataccggcatgatgcctgtcgtctattgtctcgaaaggcggtgactggccggggggcactttaatggccattgtggcacgtctttgggcttggaagtttcagcgaggatatcgtctgaaaagaaatacgaaaggacgataaccagcgaccatgatgctgactccgtcgatggtggccacacagctcaggcaacttaagtggagggacctagcaaggatagtaaccttggggctagtagctcgggtaggctcaaaccacttgagctcaagactcggcatcctaacatcattaaggaactagaattctagaaaaccctaatcatgataggggcccaggacggagtagtgtagaggtgatacaaaccattgttttcccgatcaagttagtcgatcttttcgagtctcgagctggaacccgatcgaacgtaacatagattaagtttgattgggttaatttaccagccagccgaagtgtgtagatagtgtcgtatgggggccgaaagccttccacttaagatatctcgaccgagcgggcgctccgccacgttagcaactaataaattaaaataattcgtcatctccaaccggacgggctcggagacttcgtacatactgggaacaaagttcggcgatatggggctgaatgggggccgaaaccttggaacccttccgcttagagtgcccccacctccacctgaatatggaataaattaaaaaacgcatcgagcttatgctcacgacctttttagaacactcacgacgaagtataacatacgttgtaacccaaaggatcaggccatagaaatgcgcgtcccaagcacccaattttccagaatattctctaatcactaaacctaggattccttcgattcctcgtcaattggactccgtacagccctctgaattcgctagtccatatattctagctagacactacgtaggcagttggtgactatctattaagctgatactgagggccgtgctgttaaaatatatcattggcttgagtctgtaaaaaaagtggaaaaaagtggaaaaaagtggaaaaaagtggaaaaaggtcctggttggatcgtgctactatcttgcacgcttgtttcatatccacgaggcacgaggctgccaagtccttccttttccttctctttatcaagtaccacaagaatacataactagtcccgaggtcggccgcgtttgcggctgctgtcgctaagaacggcctgatctagctagctccgtagtagtcttcagtagtctttttagtagtcttttagtacaacatagtctcttttcttgatttagttttctaatagatggcgggaaaagacggcataatttgtgaaactaacttttctacgaagtctgaataacctttgacccagtctctattaaccctggattaactttctctcctaaaatatatccagagtttgggatgtcgtgttgcccaaccactgatacggctgctctcaaatctacgccgttgcatcgaagaatccactttatcatccgagaatgtagctattgttgtatctctagttattaccctatctaatcacttttcctccctctaatgcaacagttattcaggttggtagcgcctacatctctcgcttcaccagcgccacgggcgggatatagtggtgccgtccccgcaacacataataaaccaccgcgacgataagaatcccaccgtacatcactgcgcaccagttcatggtttctggctccaccgtggaagtgagcgggaagaatgcgaacacgaaaaccgggcagaggaagcacaacgccccgatattaattgccatgccgaaccggccaagcgtccatttgtgcggtgggagaggctctcctctgatacgcttgaggagcacgcatgcaattgttatgatatatgaggacatcattgcgccaatggtcagggtcacaatggcgagtagtgcggttgtggagccgatattgatgagtgacaagaggactgtcactactagcgagaccatcacggaattcaaggggatattccaaccggggtttacctggcgctgttagtattttcaaagctgtagaaagagaataaaccatacatagccgaagaaatcggagaaaggaaggccgcgatcacgcgcgaaagaccacaactggcgcgatgccgttgcaacctctgtaattgtgctcgccgttagagtcagcactagaatagcggtcatggtgttcgttcccggcagactctctgtcgcgttatagaacacctgcatgaacggatatcctgttgggctggccaggatgtcgtcaatgtcccctagtgtgaagcagacagtcaccagcatcaggaagccggaggcggcgttgacgcagacagaggtgatcatcgcctttggcagggtttcagacgcatctttgatctcctccgctgtacaatattagcgaagttcgtcaattcgagagatagacttacacatgtgcactgcacaatcatatccaatcagcgcggtgattgtagtcgagaatccaacgagcgtggcagttcccgcgctgttccaatctccgccgttgttgaattcggtaaacacctccttcgcgctgcggcgagggccaaggacccacagcggaattatgatcgcgaacaggccgcacacatgcagaatcagaatcaatacctccacgaatggcagccgcttggccaggaatgtgttgaatatgatcgaaaacaaggtgatggcgataaccagcagggtgccgtgccaccgctggccttcataatccggatgattcagcactatcaggccttggatgatagttccagccaaatacgcgatcgctacaatggcgcattgccagcctgtagcacatagccagcctacataattagtttagttgagcggaagggatgtaggagaacttaccggtgatgtagctgaggaatttctggcagctaggaggggcaaattccgatacccaatggtattgtccgccggaggtgggcgccctggggggtcagaataattacgagacaagatctcaacgggtagactcacatggatgccatctcggccagactcaggaacaccagaaggaacccagtagcgacgatgaggtacccccagatcagaccggcagttcctccatcggtcagtccttgcgcaagcagcctatacagtcagtcattggtacaattagtaagtgtggatggcatacgtcaaaacaacctcccacgtggcgatcagcgtgcagccaaatcctacaatggagatgtatcggaagttacgctatagggtcagcgaagatgcatcaaccaggataataggaaacgtactcgcaagacttgctctttccctagagcgctcatatcggcctggtcagcctgggtgccgcgccatttgggggcgacatggcctctggacggggcttcgtcggccagagccatggtgactgttgaggtgtctttgtcccagggcatattgacatgtacacagcagagacaatgaagggtcaatacaaaggacaggggtatggtagatcacgtcggtactttgtatgaaagcaaggtgtcaagcattagaatattctccgcccctcgtggaattgaccgggtacatctgtctcatagtggagcagctcgcctccaatagaatccaggtgct
